United States Patent Application Publication US 2026/0275333 A1 - sequence listing, part 27

SEQ ID NO: 3045 - RNA, 64444167 nt, Homo sapiens (residues 55,851,615-57,999,753 of 64,444,167)
  source 1..64444167: mol_type = mRNA
ttatttgagagatttttcttcatttttggcaacctgtttatctgaaaatctacagtcctgaaagattatttctttatccttgaaatgtaaatgttttactaatatgcttgtcttatttaatttggcaggactaatcgttggtctttttgatttttagatttaattatttggctggttgggtttttttaatgtttgagatttagactcactatgcctgtgttctctttttctgcaattcttgttttgtagatttcctggaactatcctcatctcttatttttttcgctcatcatttttaacacttcttttttgccatagaattatgggtaatttttttgatttgccttccatggaacaaattctatttttttcagtacccactctgcagttcattatccccacctaagttcaatcattacttaaatttccttgcagacatttcagtgacagattattccttcttcctacttattctaactctgtaaatgtactcataaagtaaatcttaacaatgcaattattttttcaactattcccctagttttgtagccaatctattttttaaaggggcatttcccttaattctttatggttattcatgacttaaaactgtagcagattgaatatactctttggtgaacgatttctgttttagcatcttttagttttgtgtacctgcaggccccttttctggttcacctccacctttctaaagtaaaggcctgatttattattctcatctacttatttcctggaaattgtattgtagttctcacaagtatttaggctagtcctatctgcactctatgtggctaaaagtaccaaaatatctaccatatttagggccttttcctgagttctaaaattattcctatttttatcttcagctggtcatatcctgaagactttagaactctggccacatgttacccagaagatgacagatgatggatcatgattttgaatttcaggaacaaccactacctctttatccaataaccacataagcaatcacaaatcaagtaagaagcaaaatcttcagggatgctgggatggagatatataagttttcagaaagtaccaaaatacacatgattttgaaataggttgattttaaagggaggcctatatccttgaggtaaacttttcccagtaacaagcttattaaaatctctttctgctacactccacaagaaagacggaggaacagaagagaaaagggcttttagtaagagtatatggactttttttttttttgacccaaggtcttgctttgtcacctaggatgtagtgcactggcgtgatcacagctcactgaagtgtggagctcctaggctcaagcaatcctcccaccctagcttcccaagtagctgggactacaggtgcaagccactatctccagctaatttttctattttttgtagacatggggcctcactatgttccccacgctggtcacaaactcctggcctcaagcaatcctcaatcctcctgccttagcctcccaaagtgctggcattacagacataagccaccatggccatgaccttttaaagctgttttataatgaaatttttaaacatcttctccacactattaaaagctgatttttgtttaccttttatgggaaagagttttgctaacatcttagtgaaaaacagttgagagtttgtaataaaactattaatagtcattcatttattcaatcaatacatatttatgcaatacctactaggttctagaataatggctggtacattacatatattgatataacgaggaacaaatccaatccctaacctcaatctatgtaatttgcaagtctctacagacaaatagattacggatagacagataaatagatattaaacatatatgtatgtataataagccacaagtacacatatacttttagaattgaacaaatgtgtattatctccttacttaaagagaactaggtatagaatattcattaatgtataagcattctaattaattgttacaggttgaaatgaatgtgagtgtatatatgcactcatatgaaaacttcatactaaatgatgtagaacacattgcttacaccaacagtacccttttgtcttctcaacacatcctttttatcctttaataaagtccatggttttcaaaaaatagacattattaagggaatgagctgaatttcaggcatctacagttggtttatcatcaacttacattttgtaagtgttcaacatcaacacttacaaaagaaattttacatttggctgtaccatactgtaaaaataaaaagcaacaataatcacatcaacaagactatgtttgttaaatatttccataacttctgcctgttgatggcttccggctttcctacaatgggtagcatttcagattctgactgataagcaaagagctaaagtgattgctaaaaactctagagaattttaggttaaaaaagtcgtaggtgtttcatttagacacctatgtctgttgatttacttttggtttgtttgtatggctctcacaaatttctggaaaaagaaaaatgatcagagagaaggtttgaaagagtgagaaaagcaaagtggaaaaaaataacaacatgatcagagattgtaactaagtctaaatttggaaacttatttcaggttatttttatttttactcatcacagtcaataatactgttgatattcaaatagccatcaaagctttagctaagacatgttagaataagggctcatctctgaggaaattcattgaatctctcttcattgaaaggggatgggcattttaactttaggctttaatcaaaaattaagaatgtatctcctgacttagatacaactataaaaaacacattaaaatctaattactttaataaaaagatgccagccttgaaatacttcttaaaattaaaggtctgttatatttacattgagaaggacaatttatttcctaagatgcatataggcacatacaaataaactccttcttttctcattcctatgaacttgaattgtcttaaagttttgccaatgacagtgtatgacctactttgaaaatcaattatatactttttattctttcataaggtctacagttttttggctcaattcatgtgaaatgcaataaacttgtccttcaatcacagaacacaggtaaaaatacctataaagcatttttagatattattatataaaatatcaagttaaaagtaaaataactgtataatagtttggggataaactcttgataagtattcaatagtctagatataatttgatcttcaaaatctttcttacatactaactacgtaagaaatgtaaaatctttggttggcaagtagagaaatcaacatgagattattttttcttctgttattttccagggttaggggagagagaataatgagggcagagattttgtttttatctaagacattattcataaaacaacaggctaacatgttgcctgagtaaaagtatgtaacttcatactggccttgtttttttaacagggaatgaactggcattttctcctgtcagctaatgaaacaattggggatcattggagaataataaatggacaattaacagctttatctggagacaaagatttgcccatctttgaatgatgagttggcaattctgtgttttgggagcttgttttgaatgttcagagggggaacaatggagaactacaagttattgcattaagggttttgcttatgcatttatgtatgtatatatttatttttatagttgtaaacacaaatgataaaaacatgcaaaaccctgttgcagctcaaggtaaccactccctttcgtatcatcccaagaatatttctagcaaattcttggtacaatgaaaagtttaaaatttaaaactagaaaactctaaggtgaagcataagaattggactccaggccgggtgcagtggctcacacctgtaatcccagcactttgggaggccgaggtgggaggatcatgagatcaggagttcaagaccagcctaaccaacatggtgaaacccgtctctactaaaaatacaaaagttaaccaggtgtggtgatgcgtgcctgtaatcccagctacttagggggctgaggcaggagaatcgcttgaacccaggaggcagaggttgcagtgagccgagatcatgccactgcactccagcctgggtgacagagcgagattccatctcaaaaaaaaaaaaaaaaaaaaaggaattggattccaaggaataaatcagttatttttgggatttgtatcttgtctacagagttaggtagctgaatgtgataaaagatttttccaaccaccctaaataaattatgagacataacacaatggaatgcaaatgagtcattaaaaataatcatgtcgacagtgtaacacagggtttaaggtcacaaacattggtatcagataagccaagctttaaatccccattctaccatttattagctctattactttaagcaagttatatctcctctccagaagtaactgactcagagaattgtagaaattaagtgaggggatgcatttgaaatgcttatcacagggcctggtggagcctcaaaacacttttattaaatgaataagtaaacatttaatagatgtttgttcttatcacaataatttttgacatggcaatatgtcatgacatattgacatttctgagttaaaagaaatcagctgcaggaacacaggtagactatgatgtcatacccatgagtgccctgcatgtatttcacattgctgtgtgcacatgagctatctggaaggaagttctgaaaatgaattgctgctctcatgtcatgatcatttcactgtatttcactctttgctttgtattctcaagatatcatcttagagaaaccattaaggtatatataaaatcagtattgatcggagaggctttaacatttattcaaatattcatcagatggggctggagacagagattgggaataaaagatatcaggggtaatctgtctttagagatcttattcaaagataaaagatataagcatggtctccttgctcatcaggaccacaaagaaaattgtattaccatttctgtgctactgtaccactgtctttttaattttatgtttaattgatacgtaataattgcgcatatttctggggtacagtgtgatgttccgatacatatatacgatgtattctactgtcttttaaacttcccatgtaataaagagaagtgtattactcatttcaaataacctcttagagaacttctgatactagatatctataatgtttttaaaagaaaaatgaaggggtagcattttctctttggattcttgtcaaactgcaccttatcactcaccagcttttcacaaaaggaactcacagtaacatgcaatggaatgtgatggcataggacaaacccatcacctcagctggcagtgaaacttcaatagtattatcctcacacataaagtcattcattgccatgcatgatgaaatccccaggcagtctctttctgctttgagtttgtttagaagcgtttttaggatacatccaggaaatcttcagggaaaatactgaccaggaagagctggcatttcctagtctgtgaccctgagggagatggccaccattggagcttcatatccttttgctctgcatcagtaatccctccagcaaaggctaagttgatggggtcaatcagagagacaggatctgccctctctgacccatattgcgtagcttttatgcactgagatcacaccacggaaaacaaaagaatacacacaacctggaaacagaagtaacttggcaaatgagaggcttaatggctagagctgtgttatctaatactgcagctatatggagttttcttttcttttttttttttttttttgagatggagtcttgctctgtcgcccaggctggagtacagtggtgcaagctccgcctcccgagttcacgccattctcctgcctcagcctcccgagtagctgagactacaggcgcccaccaccatgcctggctaattttttgtatttttagtagagacagggtttcaccgtgctagccaggatggtctcgatctcctgacctcgtgatccgcccctctcagcctcccaaagtgctgggattacaggcgtgagcacgtccggtatggagcttttaaattaaaattaaaaagccacttctttagtcgtaatagccacatttcaaatgtgtaggtatctcacgtgactagtagataccataccggacggcacaaatacagaacatttacatccttgggagaggagctgccacataaccttttgaccttcaaaatgttgtattacgtgtatgtattaattattcaaaattaattatcgtacatttaaattttaagtagtaatgttaattgttttatataatttgtatttgaaacttcaaaaagattacccatttttcatctggggctactagggtcacagtcacaagcacacacttaagtggctgaattcagaaatattataggctgttctctccacagcaagtgtaacaacttaaaaataatgtaaggcacattttaattataatgatgaaataaaaagcgctggttttgcttcaaaggctaataataaattgcttttttaacatttattttcactcccaggtacaggaactgtatcacagatggagagtataaccagagaagtgtcaaatggtatatattgagcattagattcaaactgtgcacagcagggccatagagtgacactcacaggtatgtgatgcctggttatctccctccctgttgtctgtatgaagcagaaaatcagaatatttagtaagtaatggcatttgcagtattggtctctttcagcattaacaggagtccaaaatagccttgtgaaattctctttcatactatttgcaggggagaaatgatgcatttatgaagttatttatttatttatttaaaaatatatattgattgcaggggtagtggctcacacctgtaatcccagcaatgtgggaggctgaggcaggtggatcacttgaggccgggagttagagaccagcctggccaacatggcaaaaccccatctctactaaaaatataaaaaattagccaggtgtggtggcacacacctgtaattccagctacttgggaggctaatgcatgagaatcacttaaacttgggaggtggaggtggcagtgagccgagattgtaccactgtactccagcctgggcaacagagcaagatgctgtctcaaaatgcacgtgtgcatgcacacacacacacacgtgtgtgtgtatatatgtatgtacgtgtgtgtgtacatctatctgtgtgtgtgtgtgtatgtacctatataaataatgcttactatgagtgaggctgtattccagcccctggaaatatagcagataaagcccccatctcacattgctcactttctaagctactaagttgagtcaatgaacaaataaaatagaaagcatgtcagagagagggatggtgtgctggtaaaggcatgctaacttacacaaagtggctgtcctccaaggatgtccatgttgtaatttcaggaacctatgaatatgttaccctacatggcgaaaggggcttaggtatgagtaagttaaggttcccgagatgagaagattatcctggattatctggatgggtccaatgtagtcataagggtcctaatgaggaggcagaagagatgtggagatgggagcagatgttgaagaaatatcactgcttctggaagggggccacaagccaagaaatgtgggcaacctctagaagctggaaaagacaaaacaaacaactgacaacaaaaaacccagttctcctctatagtgtccggaagaaacacagatctgctgacaccttgattttagcccaggagaaaatatgtgggactctgacctctagcagcataacataataaatttgtgggaggagccaagatggccgaataggaacagctccggtctacagctcccagcgtgagcgacacagaagacgggtgatttctgcatttccatctgaggtaccgggttcatctcactagggagtgccagacagtgggcgcaggccagtgtgtgtgcgcaccgtgcgcgagccgaagcagggcgaggcattgcctcacctgggaagcgcaaggggtcagggagttccctttccgagtcaaagaaaggggtgacggacgcacctggaaaatcgggtcactcccacccgaatattgcgcttttcagaccggcttaagaaacggcgcaccacgagactatatcccacacctggctcagagggtcctacgcccacggaatctcgctgattgctagcacagcagtctgagatcaaactgcaaggcggcaacgaggctgggggaggggcgcccgccattgcccaggcttgcttaggtaaacaaagaagccgggaagctcgaactgggtggagcccaccacagctcaaggaggcctgcctgcctctgtaggccccacctctgggggcagggcacagacaaacaaaaagacagcagtaacctctgcagacttaagtgtccctgtctgacagctttgaagagagcagtggttctcccagcacgcagctggagatctgagaacgggcagactgcctcctcaagtgggtccctgacccctgacacccgagcagcctaactgggaggcaccccccagcagggccacactgacacctcacacggcagggtattccaacagacctgcagctgagggtcctgtctgttagaaggaaaactaacaaccagaaaggacatctacaccgaaaacccatctgtacatcaccatcatcaaagaccaaaagtagataaaaccacaaagatggggaaaaaacagaacagaaaaactggaaactctaaaacgcagagcgcctctcctcctccaaaggaacgcagttcctcaccagcaacagaacaaagctggatggagaatgattttgacgagctgagagaagaaggcttcagacgatcaaattactctgagctacgggaggacattcaaaccaaaggcaaagaagttgaaaactttgaaaaaaatttagaagaatgtataactagaataaccaatacagagaagtgcttaaaggagctgatggagctgaaaaccaaggctcgagaactacgtgaagaatgcagaagcctcaggagccgatgcgatcaactggaagaaagggtatcagcaatggaagatgaaatgaatgaaatgaagcgagaagggaagtttagagaaaaaagaataaaaagaaatgagcaaaacctccaagaaatatgggactatgtgaaaagaccaaatctacgtctgattggtgtacctgaaagtgatgtggagaatggaaccaagttggaaaacactctgcaggatattatccaggagaacttccccaatctagcaaggcaggccaacgttcagattcaggaaatacagagaacaccacaaagatactcctcgagaagagcaactccaagacacataattgtcagattcaccaaagttgaaatgaaggaaaaaatgttaagggcagccagagagaaaggtcgggttaccctcaaaggaaagcccatcagactaacagcggatctctcggcagaaaccctacaagccagaagagagtgggggccaatattcaacattcttaaagaaaagaattttcaacccagaatttcatatccagccaaactaagcttcataagtgaaggagaaataaaatattttatagacaagcaaatgctgagagattttgtcaccaccaggcctgccctaaaggagctcctgaaggaagcgctaaacatggaaaggaacaaccggtaccagccgctgcaaaatcatgccaaaatgtaaagaccatcgagactaggaagaaactgcatcaactaatgagcaaaatcaccagctaacatcataatgacaggatcaaattcacacataacaatattaactttaaatataaatggactaaattctgcaattaaaagacacagactggcaagttggataaagagtcaagacccatcagtgtgctgtattcaggaaacccatctcacgtgcagagacacacataggctcaaaataaaaggatggaggaagatctaccaagccaatggaaaacaaaaaaaggcaggggttgcaatcctagtctctgataaaacagactttaaaaccaacaaagatcaaaagagacaaagaaggccattacataatggtaaagggatcaattcaacgagaggagctaactatcctaaatatttatgcacccaatacaggagcacccagattcataaagcaagtcctcagtgacctaaaaagagacttagactcccacacattaataatgggagactttaacaccccactgtcaacattagacagatcaacgagacagaaagtcaacaaggatacccaggaattgaactcagctctgcaccaagcagacctaatagacatctacagaactctccaccccaaatcaacagaatatacatttttttcagcaccacaccacacctattccaaaattgaccacatagttggaagtaaagctctccttagcaaatgtaaaagaacagaaattataacaaactatctctcagaccacagtgcaatcaaactagaactcaggattaagaatctcactcaaagccgctcaactacatggaaactgaacaacctgctcctgaatgactactgggtacataacgaaatgaaggcagaaataaagatgttctttgaaaccaacgagaacaaagacaccacataccagaatctctgggacgcattcaaagcagtgtgtagagggaaatttatagcactaaatgcctacaagagaaagcaggaaagatccaaaattgacaccctaacatcacaattaaaagaactagaaaagcaagagcaaacacattcaaaagctagcagaaggcaagaaataactaaaatcagagcagaactgaaggaaatagtgacacaaaaaacccttcaaaaaatcaatgaatccaggagctggttttttgaaaggatcaacaaaattgatagaccgctagcaagactaataaagaaaaaaagagagaagaatcaaatagacacaataaaaaatgataaaggggatatcaccaccgatcccacagaaatacaaactaccatcagagaatactacaaacacctctacgcaaataaactagaaaatctagaagaaatggatacattcctcgacacatacactctcccaagactaaaccaggaagaagttgaatctctgaatagaccaataacaggctctgaaattgtggcaataatcaatagtttaccaaccaaaaagagtccaggaccagatagattcacagccgaattctaccagaggtacaaggaggaactggtaccattccttctgaaactattccaatcaatagaaaaagagggaatcctccctaactcattttatgaggccagcatcattctgataccaaagccgggcagagacacaaccaaaaaagagaattttagaccaatatccttgatgaacattgatgcaaaaatcctcaataaaatactggcaaaccgaattcagcagcacatcaaaaagcttatccaccatgatcaagtgggcttcatccctgggatgcaaggctggttcaatatacgcaaatcaataaatgtaatccagcatataaacagagccaaagacaaaaaccacatgattatctcaatagatgcagaaaaagcctttgacaaaattcaacaacccttcatgctaaaaactctcaataaattaggtattgatgggacgtatttcaaaataataagagctatctatgacaaacccacagccaatatcatactgaatgggcaaaaactggaagcattccctttgaaaactggcacaagacagggatgccctctctcaccactcctattcaacatagtgttggaagttctggccagggcaatcaggcaggagaaggaaataaagggtattcaattaggaaaagaggaagtcaaattgtccctgtttgcagatgacatgattgtttatctagaaaaccccatcgtctcagcccaaaatctccttaagctgataagcaacttcagcaaagtctcaggatacaaaatcaatgtacaaaaatcacaagcattcttatacaccaacaacagacaaacagagagccaaatcatgggtgaactcccattcacaattgcttcaaagagaataaaatacctaggaatccaacttacaagggatgtgaaggacctcttcaaggagaactacaaaccactgctcaaggaaataaaagaggacacaaacaaatggaagaacattccatgctcatgggtaggaagaatcaatatcgtgaaaatggccatactgcccaaggtaatttacagattcaatgccatccccatcaagctaccaatgactttcttcacagaattggaaaaaactactttaaagttcatatggaaccaaaaaagagcccgcatcgccaagtcaatcctaagccaaaagaacaaagctggaggcatcacactacctgacttcaaactatactacaaggctacagtaaccaaaacagcatggtactggtaccaaaacagagatatagatcaatggaacagaacagagccctcagaaataatgccgcatatctacaactatctgatctttgacaaacctgagaaaaacaagcaatggggaaaggattccctatttaataaatggtgctgggaaaactggctagccatatgtagaaagctgaaactggatcccttccttacaccttatacaaaaatcaattcaagatggattaaagatttaaacattagacctaaaaccataaaaaccctagaagaaaacctaggcattaccattcaggacataggcgtgggcaaggacttcatgacagcaaaagaaactaccatcagagtgaacaggcaacctacaacatgggagaaaattttcgcaacctactcatctgacaaagggctaatatccagaatctacaatgaactcaaacaaatttacaagaaaaaaacaaacaaccccatcaaaaagtgggcgaaggacatgaacagacacttctcaaaagaagacatttatgcagccaaaaaacacatgaagaaatgctcatcctcactggccatcagagaaatgcaaatcaaaaccactatgagatatcatctcacaccagttagaatggcaatcattaaaaagtcaggaaacaacaggtgctggagaggatgtggagaaataggaacacttttacactgttggtgggactgtaaactagttcaaccattgtggaagtcagtgtggcgattcctcagggatctagaactagaaataccatttgacccagccatcccattactgggtatatacccaaaggactataaatcatgctgctataaagacacatgcacacatatgtttattgcggcactattcacaatagcaaagacttggaaccaacccaaatgtccaacaatgatagactggattaagaaaatgtggcacatatacaccatggaatactatgcagccataaaaaatgatgagttcatatcctttgtagggacacggatgaaattggaaaccatcattctcagtaaactatcgcaagaacaaaaaaccaaacaccgcatattctcactcataggtgggaattgaacaatgagatcacatggacacaggaaggggaatatcacactctggggactgtggtggggtcgggggaggggggagggatagcattgggagatatacctaatgctagatgacacattagtgggtgcagcgcaccagcatggcacatgtatacatatgtaactaacctgcacaatgtgcacatgtaccctaaaacttagagtataataaaaaaaaaaaaagaaaaaagaaaaaaaaaaaacaaaaaaaaaaaataaataaataaatttgtggtgtttcaggtcactaagtttgtagcgatttgttacagcagccagaagaaactaatatgatagtcataggaggcttcattgaaaagtggacatttggacaaagatctaaaaggaggggtagcacccttcctgtgcagagattgtggtgatgtggagccttctacactccatgcctagtcaggtctccaggcatctgcaacaaccactctcctggattaggagtttaggttgccccgacccctactccacccatgcagatcactagggactgaggaggtttcccagcttcacaactaggcacatctcacccactgaattctcccttgacaatggtgcttatgcctgcctctggggacctgtaggtgggcctgccaagactggccccacccatcctgcttcataacccccagtgctgagcagggagctcagactactgttcactctatggattggcccattgtctgaggcaacagagagattctcctggtaaaaaataatcaagtatatacccagccacattggctgcagctggctcttacccataagcatcacctattgacttataggttgaactgcacagcccaataaaaaacctgctaaaagaagtacgtagggttatagaggcaaagtcagaaactctacccaacattctctatagtaacaccccctagggaggggtagagtcaaaggaaaataaatacaataatattatagggaaagaaaaaaatcttacttgcatgaaaataattatgaaaattatgtatatatatgtaacaaacaaaaacttaaagtataattaaaaaaagaaaaaaaaagaattgccactgtctccagatgagaaagaaccagcatgagaactatgacaccataaaaattctgcttgtggtgacactaccaaaggatcacactagctctccaccaatgatccctgaccaaaatgtaaactcagaaatggcagataaagaagttaaggcatggattgcaaggaaactcaatgagatccaagagaaggttgaaaatcaacacaaagaaacttctaaagcttccttcaatccaggaattgaaggaagagataaaaattttaaaaagaaatcaatcagagcttctggaatttaaaaactcatttaaatttcaaaatataattgaaagcttatatttgcttatatcttctatttgactagatcaaatagaagaaagaattttagaccttgaagactggtcttttgaactaacttagacaagataaagaaaaaagaattaagaaaaatgaacaaagtattcaagaaatatgggattatgtaaagtgatcaaacctacaaattactggcactcctgagagaagaagaaaaagtaaataacctgaaaaacataggtcagggaataattcaagaaaatttccctaattttgacagagaggtagacatccagatacaagaaatccagagaaactatacaaaatgaacgtcctcaaggcatatagtcaccagaatggcagccagagaaaaaggccagatcatatacaaagggaaccagatcaggttaatagcagacttctcagcagaaatcttacaagccaggagaggattgggagcctgttttcagcaatcttaaagaaaagaaattccaaccaagtatttcatatcctgccaaactaagcttcataagtggagaagaaataaaattttttccagaaaagaaagcgctaaggaaatttgttaccactagaccagctttacaagagattcttaagggagttctaaacattgaaacaaaagaatacctactaccaaaaagacacttaagtatatagcccgaagatgttataaaacaaccacacgatagaaactacagaatagctaaaaatagaatcaaaaatctcaataccaaatattaacctcaaatatcaatattaatattgaatgtaaattgtctaaacacccccacttaaaaggcgcagagatgcaaactggattttttaaaaaggctcatccatcttttgtcttcaaaagaccaatcttacatgtaacaacacccataggctcaaaataaagggttaaaaagatctatcatgcaaacaaaaaactaaaaagagctgggatcactattcctatatcagataaaaacagactttaaacgaacaatagttaaaaaaaggacaaagaagaacattacatcataacaggttcaatccaacaagatgacttaactattctaaatatatattcacttaacagtgcagcactcagattcataaaacaactactttaagacctaaaaaagatttatacagccatgcaataatactgagagacttcaacacaccactgacagcattaaacagaggcagaaaactaacaaggaaattctagacttgaattcaacacttaaccaactggacttaaaaggcatctatggaatactccccctatcaaccacagaataatacactctctcatctgcacacagaacatactccaagattgaccacaggctcacccataaagcaagtctcaatcaactcaaaaaaatcaaaaccataccaaccacactcttggaccacagtgggataaaaagaaaaaaaatcagtaccccagtcctctcaaaaccacacaactacatgaaaattaaacaacttgcttctaattaacttttggataaacaaaaaaattaaggcagaaattttaaaaaaatctttgaaataaatgaaaacagagacacaccatagcaaagtctctgggatgcagaaaaaccaggggaaaaaaggaaagtttacagcacgacatccttatgtgaaaaagttagaaagatctcaaactaacaacctaatattacacttagaggaactagaaaaacaagaacaaataaaatccaaggctaggagaacaaataaaataagtaaaattggagtggaactgaacggaattgagacccaaaaatctacacaatcgatgaaagaaaaagttgtttctttgaaaggaaaaacaagattgatagatcactagctagattaacaaaaaaaaaaagagagagagagatccaaataagcacaattagaaatggcaaaaatgacattacaaccaatcccacagaaatacaaaagatcctcagagactactatgaacacctctatacactcaaactagaaaatctagaggaaatggatgaatttctggaaacacacaacctcccaaggtaaaatcaggaataaattgaaaccccagacaggccaatatcaagttttgaaattgaatcattaataaaaacctaccaaccataaaagcccagaccagatggattctgtcttagtctgttcttgcacttctataaagaaatacctgagatggaataatttataaagaaaagaggtttaactggctcatgattccacaggctgtaaggaagcatgactggggaggcctcaggaaacttacaatcatggtggaaggtgaaggggaagcaggcacttcttcacatggccagaggaggaagaagtgaggcaggaggtgctacacatgtttaaacaaccagatctcacaataactcactcactatcacaagaacagaaccaaagggaaatctgcccccatgattcaatcacctcctaccaggccctatctccaacattggagattagaatttgacatgagatttgggcagaggaacagacccaaaccatatcagatttatagctgaattttatcagacctacaaagaaaagctagtaccaatcctactgaaactatttcaaaaaagtaaggaagagggactcctccataactcattctgtgaaggtagcgtcaccctaacgccaagaacctggcagagatacaacgaacaaaataaaacctcaggccaatatccctgatgaacacagactcaaaaatcctcaacaaaatactagcaaacttaatccagcagcacatcaaaaagttaattcaccacaatcaggtaggtttcatccctaggatgcaaggttggttcaacagatgcaaattaataaaagtgattcaccacataaagagaaataaaaacaaaaaccatatcatcttctcaacagatgcaggaaaaaccttcaaggaaacccaacatcctctcctgttataaaccttcaacaaactgggcagcaaaagaacatacctcaaaataataggagccatctatgacaaactcacaaccaacatcatacggaggaggcaaaagccggaagcattcctcttgagaactggaacatgccaaggatgcccatacttaccacctattcaccatagtactagaagtcctagccagagaaagaaataaagcgcatccaaaatgaaaaaaagaagtcaaagtagctcttgtctctgataataaaattttatacctggagaaccctaaatactcaattaaaaggctcaaggagctgatcaacaacttcagtaaggtttcaagatacaaaatcaatctccaaaaatcagtagcatttctgtacatcaataatgttcaagctgagagccaaatcaggaatgcaatcccatttacaataataacaaatgcaataaaatacttagaaatacatccaaccaagcaggtgaaagatctctacaaggagaactagaaaacattgctaaaagaaatcatagatgacacaaatagacaaacattccatgctcatcaattggaagaatcaataccattaaaatggccatactgtcccaaacaatctaccaatttgatatttacatcaaagtggcaacatcatctttcacaaaactaggaaaaactattctgaaatttatatctaaccaaaaaagatcccaaatggccaaagcaatcctaagcaaaaagaataaactcagaggcattacattacctgacttcaaactatagtataaggctacagtaaccataacagcatggtactggtacaagaacagataccaatagaacagaattttaaaaccaatagaacagaattttaaaaaacacaaataaagctgcatacctccagctatctgatcttcagcaaagtcaacaaaaataagcaatgaggaaaagactccctattcaataaatcgtactgagatagctgactaaccatatgcagaagaatgtaactggacctctaccatttgccatataccaaaattaactaaatgtggattatagatttaaatgtcagacctcaagcttataaaaatcctagaagaacacccaggggacatcacactgcacactaaccttgggaaagaatttatgactaactccttgaaagcaattgcaacaaaaacaaaaaattgataagtagaacataattaaattttgcttctgttcagcaaaagaaataatcaacagggtaatcagacgacctacagaataggagaaaatatttccaaactatgcatatgacaaaggttaaatacccagaatctacaaggaatttaaagaactgaacaagcaaaaccaaataatcccatttaaaaaactgggcaaaacacagaaacagacacttctcaaaagaagacatacaaatggccaacaaacatatgagaaaatgcaaatcaaaaccacagggaaatattgtctcacaccagtcagaatggctgctactaaaaagaccagaaaacaacagatgttgatgaagctgcagagaaaaaggaacacttatatgctgttggtgaaaaggtaaattagttcagccactgtagaaagcagtttgaagatttctcagagaacctaaaaaagaactaacatttgacccagtaatctcattactatgtatatgtccaaaagaaaataaatcattcttccaaaaagacacatatacttgtatgttcattgcagcactattcacaatagcaaaaccaaggaatcaacctaggggcctactaatggtagattgaatttttaaaatgtggtatatatacaccatcaaatcctatacagccataaaaaagaacaaaagaatgtcctttgtagcaacataaatgcagctggaggcccttatcctaagtcaagtaatgcaggagcagaaaaccaagtactgtatggtcatatggtctcacttataagtgggagctaaatacctgctactcatgaacataaagatggcaacagtaaacactggggactattgtgaggggagagatgggggcaaggactgaataaacttttgggtactatactcactacctgcgtggactggatcactcataccccaaacctcagcatcacacagtatacccatgtaactcctgtattcagggggcacatgtgccccctgaatctgcaataaaagttgaaattatatatatatatgtgtgtatacacatgcatatacacacacatatatacatatacatacatataaacatatatgtatataaatacatgtatatatataaaatgtatatatatataatatatataaaatgtgtatgcatatatataatgtgtgtgtgtgtgtatatatatatatataaaggagaagtggggcaagccatgtgtgtatctgaggaaaatgcattcccggcagaggaaacagcaagtgaaattccgaggcaggtacacaaccagcacattggagtgacatcaggagaacagtgcagctgagtggagtcaggaggaggaatgtagcagggagtgaagtcagaagtgactgtcaaaggaagcagacacatatcaggcaaactgggctgtcgtaaagattctggcttttacctcaaatgagtccctgaagaggttttcaacaacaatgaaatgacatgatggaacttatgttgaagaggactactcaggctgctgctgagattagattgcagagagcaaacgcagaatgagggagatcagataggaggctcttctaatagcccaggtgaaaggtaatgatggcatgggtcagggcagttgaatgtggtgggtctgtaggtgcattgtacaagaatcattctggttgtgagattagaagacattgtggggttgggttgtggggcaagtcaaggagcagtgggacagttggagaattactacaataatttagggaacaaactaagattgctaggaccttcatccaagaagagatgattgacactggaatctattttcaaggtagagctgaaagggttttctgacatctggtaaaaatgcaagttacctggggagtgctaccacccacagctttcctttcccttttccctttatcacttaatcctgagccccaggcagcctaaatattctccctaggagacccacctttatggtccatctgaacaatttactagcttatttataacgagaaaagagaaaggttggatagtcaaaatcaactcaggtcctcaaacaatatctataccaatactctcaacctcctttgtccaccaaatgtttcatcagaactatgtaagaatgaaattataataagctttggagatagagtcaacaggtacagaaagactccaagattcttactttatctagtcggggcactgcattcctagatgtccaatagatccttgggtttagtgaactactttcaatatttcaaaaatattttcagaaactttgcatagaagtataatattgcattgctgatgatgttatataacttccccatttgggttactttatagtcactctgtgtggttcaaactatattggtcaataagtcttaatagaaacaagaaaatcaattactacttaaaaaagtgtaatttgtttgaaaaatatctttaaaactataaggactacagtgaaacgaatacagatggtgactaggggaaacctttgggaaatatgaagtgagttgttttcagctcaggtgatccttacaatctcctccacagattattggagatggtgaattcaaatacaccgtctgccactcactgacctagtagagtggacggttgtgatctgcctgaccagcactcaccctcccgtcttttgatgacagcttcctaacattccttgggaatccacgtctgcccagctttcaggctgcaggtccacaagtccaggtgaattttctcccttgccagcgcccaggattccatggggtacagtcctgtccaatcagaacattgcattctcttggccactatgattggctcagagatgaccatgtgactcgatcaaatctgaccctaagaattttgctagaaagaccaagaagaaaagcaccattttaccctctagattttccaagaagttatgatgcaggcctagagctgttggtgccatcatgtcaccacaagggacagcctgcttggaaatggagccaacgcagaggtgagaagagcttaaagatggctaaaagagcctgagtcttgagctttggtcattcactgacaagtgaaagaaaactgattcgttttaagaattaaatgaccaggttttcatcctatttctttaacttagctgctatggaataagtcatttggtttcagcaatcccataaaagctaatttgttaccaagagtgttgagaggaataattagtatgagtctcaaagcaatttgaaatgtgtaaatgtgctatacaaaaacaaaagagcaaaatgcaggtatgattgtcagctactttccctcctcacaatctaatgacagcaaatagtgaaataacttaatggtaggagttagtgaggcaaagtccataaataattgagaatcattaaatataaataattatctcattattaaacctttagagtggactatggtgaatatactctaaaaggcctatgtgttccaccaacaccttttatctccatactgtaatcagctctcaaaaattccaggttgtgtaagtgtttctgtgtgtttatttcttctccattaaacttgaataggacacgagtcattatggactcccatccattataggagtgttggagcctttcaacattcgcataggaataattaaaagagatttatgattctattttagaacataaaaagttttgttgcatgaattacgctaatatttctaagcccgtttgactttctctgctgcctgcccatccagacaagcatgagttgtttctgtactccatagggaaggtgtttagtgaggcactggcattgtggggttttttgaagtattgtgttctttgagtggagtttgctgacacggtgtgaatgggcacagctcccaagatagcaagtgcagccttgccaagttcagaataagttggtgccttgtagagcaataaccaagaccaaggctatccaactgtgtggtactgagttcaaactaaacacaaataatacatacacttccagaacaaccccaaaacagattatcatggaagatgatgtaactcaagatagttataataatatacaaatataactcatcatgagtatgccctccattgtaaaaatcacatctacccccaagattcaaacctagttgtgtgcacccccaaagcccacacattaaatcaccacgctctacattgcaaactgcccccactaggagagctgacatgcaaaataattctgtccacaagtactcatctttccccattaccattcactcaaatcttttgatgctgttctttaaacacatcttgacgtctagacccttgaacactttccaagtgtttcagtctctttttccattgtgactttgctctcctcccaaccccagaaccagtggtcttggtgaactgtttgcaatgatggcacatcctcataatcttgaacccctaccatttctcctgagcccagtgcccagccatgagtaaccctcatcacctatttgcttggatcctatttctgagctatgaaatatggctaaaagtctgataaaactgagcctaatagatcccctacatatcattcctctcagcaagacccacatagggccacagaagtggtaaattggttttaaccttattaagaacaacctgagtgataactgcagtgaccaatcatcatccaaatgagattattttgcctggaacaaattataaatgccatttgttcaggacaccaggactgccctgagcaaactttatatatagttactatagttcttttcttctttcttgagttggagtctcactctgtcacccaggctggagtgcagtggtgcaatcttggctcactgcaacatccgcataccaaattcaagtgattctcctacctcagcctcctgagcagctgggatcacaggtgcctgctaccgtgcctggctaatttttgtatttttagtagagacggggtttcaccatgttggccaggctggtctcgaactcttgacctcaagtggtccattctcctcgacctcccaaagtgctgggattataggcatgagctcccatgcctaacctagttactaacacacttagccataaagattaaaatcaatggttctagaatctgactgatcccatactgaatttctgcaatgccacattgtaagcatgtgactttgatcatacagtttaaccattctaagactcaatttccttagccataaactatggataataacaatacctagccctagtattgcaataaggggacattttattattatatcaaatttaattggtctacctaacattgttgaaaatagtaaggagtgaatctatgtgttacttcttaccctgaatacacatgaagaactgcatggtttatacaaagcagtacttcacaatccattacaaaccaatccttgtatttctctggaggacaactcttcttgccctggtgtcatctcccagagtcccttgaaaatgatcccttcccccagtctacagaacccataataaaagtacagctatccctaataagctcccaaatttcatgaaaacctacctagccattgttgtttgataaagtaacagacacagagcaagaaactttatatcaatgaaataacctgtgtaaaatagctaatgcaattaagcagaactgttcaacaaacttaaagaatgtgtaaacatatagaatgcacaaagccaaaaactctaacgaaatatatctccaagatctggaattgttggcatgaactaaaatgattaatcttgttttgcctaatattcaaaaatcagctgcagcaacataagatctagagatccagtttagcagggattcatgagaacaaaacttaagcatgcttatgagccattgagggatgcagggaacatggctgaaagtaaatgtaaagcaatcaatgtctgcattcttctacaactgtagatttcaacatgacaaaagtgccgggccatgaaccatcaaagtgtgccatgaaattttattcactatataccagcggtccccaacctttttggcaccagagatcagttttggggaagacaatttttccacagacccagggttagaggggattggtttcaggacgaaacttccacctcaaatcatcaggcattaggttagattctcataaggagcatgcaacctagatccctcacatgtgcaattcacaatagggtttgtactcctaggagaatctaatactgttgctgatctgacaggaggcagtgctcaggcagtcacgttcgctcacccaccactcacttcctgccatgtggcccagttcctaacaggctacgaaccagtactagtccacggcctgggggtctgggattcctgctatatacaatatattactacaactgaaggtacactcacgcaattacaaataaatacatgatataaataagctgggtgtgtcgtctgacacggtgtagactcaggtgtagtttgctgagaaataccaccataacgtcatgcacaaatcagaacaaaaaaaatacatggaaatgcaaagaatattttgcttcctgattgtgtaagagaatgtgttcaggacaacaatgatttcttttatatccgagggggaaggaaagggataagtcccctacaaatctttccgtgtgcaagacccacatagggctacggaagtggatttacctggttaaacactatcataaacaacctgagtgatagtaagtggaatgaccatataatttatcatccaaacaggatgcttttgtctgagacaaatgacaaatgtcaatggacaacaggactatcctgggcatacaagtcatggaataatagcgtatgtaatttaatcactttggatgggtcaccataacttttagtcttcaaaagtgtatggcttagaaatatcaccatttggcaaatgccacagcaataattgttgcaagtaaaaattgtcaattgttgctaaaattagtgggcaacagaacgaacaactcagaaagacagaaagtaaattattggtcactagaagctgaggagaggtaataatagggtgtgatggctgatggatatgggtttcaaaagcggtgatgaaaatgttctggaattacacagtgatgacagttgtacaaacttgtgaatataataaaagccactgaactgtatatattaaaaagtgaattctatagtatgtagattatatctcaatgcaaaataataataaaaattagtcaacaaagagtgagaaggtacaggatatttacatagcctcaaagcatcttgtaacaagatacatataaattgcaaagcaaaattgtaacttcagtggagaaacctgcaggacactaccttaactagatattcaaagttaatatcatcagtaataaaacaaattcacaccacgtgcctcctgattcaaagctctggagacacaagagtacttctgtagtattttcctaaaagtatgtaacctaaatctcatcatgagagagtatcaggcaaacaccacaacatcccaaattgagagacattctacaaatagctagtcagtatgcttcaaaagcatcaaggccattgtagtgggttgaattgtggcccccaaaatatatgccaactcaagaccccaaaacgtgactttatctggaataaacatctttccagatgtaatggagataaggatctcaaaataagatcattctgcctaaggatgggccctaaatccagtaacaggtgtctttaaaaagggagactacacaagaacatagaagaaacccatgtaagaacagaggcagaaagtggaattttggagccccaagccaaggagtgccagcaaccagccggaagagaggcatgaaactgattctccctcagagcctccatggagaagccaccctgatgacaccctaattttgttcttctggccttcagatctgagagagaatcaatttctgttgttttaacctaccaagtttgtgacaatgtgctgcagcagccctaagaagctaaggcagtcctaaaaaagaaagaaaagccgaggaaccgttccagattaaaaggacctaggaaggagacatgtaatactgagttggatcttgaactagaaaaaaggacattagtaggataatctgtaaaagttgaataagatttgtagattatagtattgtattaatattcattatacagttattttgtaattttactgaggttttaaaaaatgtaaacctttgggaaccaggtgaaagtatgtaattctttggattatttttgcaaatattttccaagtctgaaattatttcaaagtaaatacagtcatcctttggtacccttggggaattggttccaggctctccctcgtatctaaaaatctgtcgatcctcaagttcccgatataaaatgacatatctagtatttgcatataaactatattctcccatatgctttatgtcatctctagattacttataatacctaatacaatgtaagtgttaatgtaaatcgttgttatactgtattgtttggggaatcacgacaagaaaaagtctgcacatgttcagtacagatgcaaattttttaaatattttcaatccacagtcaactgaactcacaactgtggaacccacagacatggaggtctgactgtaattcaaaaataaataaataatttaaattgtacagctaaccttagttgtaagaaccaccaaaactgctcaggactgagcaagtcatagacacaccgcatcgtttttaagctgtcagattctgggcagttagattttgttggttggttaaaagcataaggtcctagaatcatacaacttccctactggctcagatatatgttcttaaactcattgcttactctctatgtatctcagttttcttgtgtgcaaatagaaaataatcacaatatctccctcacagaattgttttgaagatacttaagaatctatgtaaagtgcttagcaccgtgcatgacagataataactgcttacaactgttagctccttttatgatattggttagtgaatataaccagccctatacttggcacagagaataaagcgaaaaaaaaaatgcaactttctgttttgaaaaacactcatgtactgaggaaatcataaaaccaagaagaagcagtgagtagtggtaaacaaaggacgctactagggtaaaaaactaagtagcctgtggtttcttttccagaagactgaagagacattactacatgaaaaaaaaaaaaaaaaaaaaaaagaatgtttgcaaagaagagaagctcaatgaaaagttgttgaacacaatcattggctaacaattagagatgactttgcaaacactgtgcctgcaatcactggaggcaatcagaaaaatctaatgcactctcgggtctattaaatgggaatttctgtagcaagtaggaggttggaaaatctgactgctgagggtctgtaaatatgcattcttctattcttccctttttcgtggtctctccccgcatcttttcacatcttactcgacatggatgggaagactattttcatctctaagactgaaaactgattaaatatttattgggaccagcaattgaaaccaaaaaatgtggccaagattgagaccctatatccctttaaactttttgccaacttcatccagaggccatcattgtctctttcaagtgactttgggctctgtgggtgctgagtacattaccctattccctgccagctctgcagagggctggcgctgcgcctactgccaaccgtgcagtttgccagcaaaatctccaagctgggaaaatacacacacatcaaaagatctgctacgaggtttagcagccaggcacagaatggatgcacaattgtaattcaagtcaaggccatccagctctatgtaaagccttagtgagtgatgactggcatactcctcaggtacattttggggtctctccaaatgatgcactgccaagagacacctagggctcttttgtggctttcccttcagagcggccaggaggaggaaacacatttcacttgccccaaacccaaaggtgtctcctctcattctaagcttccctgagggtttcttctatgagaagcagcaggagaatcctctctgttggcatctccccaaggagggcacacacaattaaaaattttgagaaaatatgcacctcaaagatcctcaaaaggatcagatgggattgctgattagcagaagctagaattgggtggcaagggcatttgtccccacaaatgtttccttccccttcaagcatgccacctgattcaaagtagcccattgaaaggacaagcaggaaagaacattaaccctcacctccccagcctcccactgcactcccactacaaaaacgggtgatcaagtagacaaaaagaaaactattgaaaatgccgctcaattgctttaggcatttgtttactggtttattttttctcaagtaactggctggactacaatcagtgaggatttttcatttgccatgtttttgtgtgatttctcaatcaatattcatctttcatgtatctaaaagacaggaacagctccaggcaagagtcgactattctgagttattcatttacaagaagaaattgcttcactaagacctgagtgatctgccagcacgacacgggaacatttgagttacagcagacatttatttttctcatgttttatttttggggaggataggttggtgtttgtccatgtaaatctggtagcctcccttaacatttaagaagagaaaatggtaaggtataaagacttccctaagcaattggtgggctaggaaaacaacatttaacaaatcaacaattcactgggtgtttactttatgctacacattatgctaagtgctttacaatcatcatctcatttaaacctacaacaatcttataaaaaggcatattattgttcccgaatgataggtgaagaaactagggttcagaaatattgttaagtaacctgcctcaggagacactaagaacacactgagaaaatgcttactggattcatgtagtaaaatgaggatgataaagaaaaggttattaaattgattttaaatagtatgacttttcttttttcttcttttattattatactttaagttttagggtacatgtgcacattgtgcaggttagttacatatgtatacatgtgccacgctggtgcgctgcacccactaactcgtcatctagcattaggtatatctcccaatgctatccttcccccctccccccaccccacaacagtccccagagtgtgatgttccccttcctgtgtccatgtgttctcattgttcaattcccacctatgagtgagaatatgcggtgtttggttttttgttcttgcgatcgtttactgagaatgatgatttccaatttcatccatgtccctacaaaggacatgaactcatccttttttatggctgcatagtattccatggtgtatatgagttgaaagagaccgtttcagccactgacacttgagagattcactgttcatttctatcctcttaactccccttttgaatgtcctagagttcacagaatcttgttgttaattcacattttctttcaaacttcagaactcttatttctcacatgtagactaagctgcagccaaaaagttcatcactcctcactagagaaaggaatcaaagttcacatcagaaaaatgtgacaatcatgctggctgtgtggtcacctttttaaatcaacttcctggctctcctaaaaataagtgttatgcaaatgcatagcaaatatatatacacacatatatatgcatatacatgcatagtgtacatatacctacatatgcatacacacacacacacacacacacatacacacatggcaacttggtcactgtggccatttctagggagatcaatgtgatttgagggaagaaacggggacatagaggtgaagatattttagcattttactctaaaccctaattctttgttttatagcaaatattcctaagtttgaaagccatttttaagaaagtgcaataattcatggtcatcactggtataaagaataaggatttgttgagaggagtttgattgaatatgcttcatatattgtgataggaaaaccatcttcaggaaaacaggaaatccatgtcctctggttgtcaaagagcttcttacccagaagtggctgctgctggtgctgctagggtccttcaccgggcctgagcaccaagcctcaggggctgttaatgattcacagatgctcctttctccagataatctctctctgccaactgagagcttcctgcctttccaggaggttgcactttcaccccattccccgaagaggctgagccgtttaggggagaagccagtggccaatgccctgctgacatgggggtttgagtgcccagtccctggcctccagtaaaccaaccctgtggagccttttatgccccagagcttccccatgaggttagcctgaggctcaagtcctgctggaaccacatccttgcttagattctcctgctcctttgtgcttccccttcatctgtcctgggagcaatccctcaataaatcactttcacagtaacccttgtttcaggctctgcttcccaggagctcaacctaagacgctcccattacctctcactctctaatacttaggggctgagatatttacaagggaattcagtgacccttaattcaatgaacagatatctttaaatttgtttaaaatgttcaacaacacacacacacacctaaaatcattttctgaagcctccacatcattgatactaattcttgacaaaacacaagaaaagaacaatctgacatataaacactgatgcgaaaagtcttaaaatgttaacaaaaacaaaagaaacaaaaacttagcacatgaaaagaatgattctatgcccaaatgaggtttataacctgaaggataactaacatatttagtgctcaatggctataaagcccatgatgttgtaaagataataaaaagacattttgttaaatatttgttatataagaataatttcataacataatttttgaagacatatgtagatataaaaacaattagaatatataaagggataataaactttatttcaaaattgaaaatatatattttaaaatcagcacataaattcaataagaaatatatagtatcttaaaaatatattgtattgaactgaattttcatccctaaaattcacctgttgaagtctcaaccctcaactgactgcatttaaagataggactttcaaaaggctaaagtcaaatgaggttataagggtgggaccttaatgaataggagaagtgtccttataagaagaagaaaagaccccagagatctgtttcagtacatgtatagaggacacagtaggaccactgtgtgtgtgcagatggacaaggtgacgatctacaagccaggaaaacaggcctgaccagaaaccagccctgacaccttgatgtcagacttccagccttcagaactgtgagaaaataaattattgttgtttaagccaccagttttgtagtattttgttattacagcccaggcaaactactatacctataaagcataattactaggatttagacagtattgatacattaaaagatatttgtcacttttggctaagataactcaatcttactaagaagtcaactctccctaaattagtatgtgaatgtagtatgatccttattaaaattccaaaaagtgtatttcattgagttgtaggttttttcttttttggaaggaagccaattaattaaggtctcaggaaaaaataatcacacacacacacacacaaaattttttgaaaaggcaatgtaagtaggtggtaggattaaccttgaaagagaaaacattatgaagttggagtaatctaatgagataataaatgtaaattgcttagcacaatgcttgacacaggaatggaaagattaatgagacaaaactgaatgaagaaaacagacaaatacagatggggatttaatttatgacaaagcttgcattttgtatcagtggggaaagacaaattattcaatgaatgactttgggacacctgagaagtgttctaaaaataaaatcaggccggggggcggtggctcacgcctgtaatcccagcactttgggaagccaacgtgggcagatcacgaggtcaggaaatcgagacgatcctggctaacagggtgaaaccctgtctttgctaaaaatacaaaaacaaaattagccgggagtggtatctggtgcctgtagtcccagatattcgggaggctgaggcgagagaatggcatgaacccaggaggtgtagcttgcagtgagaaatcgcgccactgcactccagcctgggaggcagagcgagaccccgtctcaaaaacaaaaatttaaaaaaaaaaaagtgaatctctacattatttctttcaccaaaaatcatctcaaatgggtcaatgatataaagccttaaaagcactagaagaaaacatgggagtttaaaaaaataacatttctttctattaaagatctttataagcaagatctttctaatcttgaaataaggactatctttctaagaaacagattataaatcttactgtattcaaatgtttctgtttgcttttattgtggagagacaaatgactaacaaggtaaaagtatttaaagttcatgtaatactactttctctactttatcaagaacacttaatttaaaagaaacaacatctcaaggtggcttcatggcgcaatggatagcacattggacttctagtgaccaaaaaataaagatcatcccaatttataaaaatgagaaataactttaacatggtgtttgtaggaggaataacatgacttacaaacaatcataaaggtattcaacaccactcattttttttttttttttttgagatggagtctaactctgtcacccatcctggagtgcaatggcacgatcatagctcactgcaacctccacctcccgggttcaagcaattctcctgcctcagccttccgagtagctgggactacaggtgtgtgccatcgcacctggctaatttttgtatttttcctagagatgggatttcactgtgttggccaggctggtctcaaactcctgacctcgtgatctgcccgcctcagcctcccaaagtgctgggattacaggcatgagccactgcgcccagccaatttaatttttttaaaaagaccaacatgtagtacttggtgaggatgggaagaaacaggatttttcaggccctattatgtaagtgaagatcggtgcacactctctggaaagcaacttggcagtatttataaaaatataaaatgcacagaatgatggttctggcaatccaacgctaagtatttgttgtgtagcatgccctttgtttgtccaaaagtatatggacaaggatgttcgttgcaacattgattagaaaagaccggaaacaacctacatacctcctggtaataaaatagttgaacaagcaaacaaacataaacaatccatacaaggtttatgtatttcttacaaacaggatttaaataatttaataataaaggacatgaggtacaagggtttgcaaacttttactgtgtaaggccagatagtaaatattttaggctttgtttgtgtaccatctggcctcattaacaattcttcaactctgctattacagaaacaaatgggtgtgcctgtgtttccgtataattatatttacaaaactggatggcaagccagatttgacccttgggctgtagtttttccactctgatttaatggatttatttatggataagtgagtgatccatacttattaatgaattggatatatagattgtgaattttatggataaatcttccatacatgatttaattatatatgttatgttatccctattatgtattttatatacatggatattattgaataatagtttctacaggattataccttatagctgtgaaaaagaataaggtaacctgcaagttataatacaaaaacctccaagatacattaagcagaaaacacgagtagcagaaccatgacaatagtacactcctgtttgtatttaacaatgtacaagttttatgcaatatttgtaaatgatgcagaatttgtcattacctctagggaaaggattgagggactggttttctggggaaatcgagaaaagttcacttcccttttatattcttttgtactctttcactgtgtatacataattttaaactataaaatacacatttttaaaagaaaattaataaaatgtatggactaaaaatgtatgggcaagtagatataacacaatttggaagttaggctgatggtcagctggcatcctgctagaaagatcatgcctgtttttaaaatgttgatctatgtctggagcagttgagaaataaccatttctccgaacacattgaaagtttccatcagcctggcagtcctagtgccactacaggaatgaaccgctcctcaaaataccccagcacctgtagtttctcaacaaagtttgtaatttcactgagcttctctttagtcactgaagcataatcagtatcacttggcctacctggccctgaatttgttggagtatgagaggagataacatatctaaaagcactctgcaaaatagaatctttgtggccaacataagataattaacatcttttcttccccccgacttagagcctgttgacaaagccaatgtggagtatttcttctaggaacacaattactttctaacatccatgctcaaaacgtcgcctttcattcatacctctattatatcacgaataatagcattgtctagtgtgttgaatatgtgtcaatttcatttgctatccagaatcctttaattaaaaatgtggcttatttgcatatactcaggacccactataatggctgatgtagacacaggatatgtttgatgaataaataaacagaaagagggtaaagaaacataatgagagagatctacaaaaagaaatctgtttatgtgttgaaaggaatattttcaactccacttctcaattgtctccagagaaactcagtgacagtttgtaaagcagtcccagaataagagtgtaatttatatatcattgcttgaaactactgatgggattctaatatacatatatatatatgtgtacatacatgtatatacacacacacacagagatatatatatatacacatatatctatataacaaatatttattaagtggctatagaaattgcctagattcttaggaatacaatatgagcaaaacagtcacttctgtcttggggcttatggtctaatggttaaggagacaataataaaactatcacataaatgtgggcattctttttttttttttttttttttttttttgagacggagtctcgctctgtcgcccaggctggagtgcagtggcgcgatctcggctcactgcaagctccgcctcccgggttcacgccattctcctgcctcagcctcccgagtagctgggactacaggcgcccgccactacgcccggctaattttttgtatttttagtagagacggggtttcaccgtgttagccaggatggtctcgatctcctgacctcgtgatccgcccgcctcggcctcccaaagtgctgggattacaggcgtgagccaccgcgcccggcctgggcattctttttaatgaagatagatggtatggaggaaatgaggttttattatagcatataacaaggaagagtctagttggtgaggtatgtctgggggaacgatcagggaagtgttccctgggggagtgacacatgaactgatagccaaagaaaagtaacagttgaccagatcagggcagtgggttctgtctataggttcatagcaatggccctgtgaaaaaatacacatggagcctttaaggacaattagcgcacagagagaagagtgaccatagattacttagactgccatgtgcccatgagagcccatgacctcctagtctgtaggcacatggccagactacatttcccagcttcccttgcagttagatgtggccacgtggcagagttccacccaatggcatgtggaggaagtgacctaactctaaaggagcagctgttctttttccatattctttcccattcagcggacaggaaaaaaatgatgatgagaccccggggtaaagaggagccaaaggatggaaggagctcaggacttccaggaaacctgaactcactgttagggctgttgcctgcgtgagaaataaatttctgttgtggttgaatcattatatacttttgaaactatcccttcagcctggcctacccatactatgagagagaagtgtgagccagattgtgcagggccttgtgggtcacattaaagatactggggtttaggctgggcacggtggctcatgcctataatcccagcactttgggaggccgaggcgggtggatcacgaggtcagaagtttgagaccatcctgaccaacatcgtgaaaccctgtctctactaaaaatacaaaaatgagctgggcgtggtggcacgtgcctgtaatcccagctactcaagaggctgaggcaggagaatcgcttgaacctggcaggcggcggttgcattgagttgagattgtgccactgcactccagcctggccgacacagtgagactccattaaaaaaaagaaagaaaagaaaagatattggggtttctcctaagaaatggggagccattgaggggttttatgcaagatagtgagacatgatcaaatgtatatttttgaaaagatgattctggtcactctatagagagttataaattgctccagtttaccattttactttgctaggttgcccctgtactagattagataaggaagtagcaaaacaataagatatttcagagatatgccatagtaaggagtaaatggcatcaggtttgaagtaatggaaagaaagtaaggaatactaatagacaagcaatattaaaagtatgagaataaaaattcacaaaaagaaaaaaccattaaagcattttctaaaacaaaaagtagaagcaagtacagtcacaatgagcaaagaaggcagcagaaagcactgttacaagaatcatgggatttggaatcagagcacagctctgccactcaccagctttatgctgctgggaatattacctagattctctagtcttcaagtttctccatctgtggaatggggacaatagaatttatgttgcagaatttccattaggacacaatgaggcgatgctatcaattgtgcagtagtgcctggcatggagccagtgctcatcagtgttagctgttatgagtattcagagccagcgtgggaatgagtgggttggatatcataggaaatggacatgatctaaaaaatcatatgggttcccaagattgaaatcaaggcagatgataaaatattttggaaaatcatgaaaacatgctatctatgaaaactggggccatgacaaggaagcaggagaaaagaagttcatcccactgagaagtaaaagtccttttatttaggatccatcaacctcagcaatattgacaatgtcagccagataatcttttgttgtacaggctgggggaagaggctgtctgtgaattacaggatgttgaccagcatctgggtctctatccactagatgccaataacatctccctcttcagttgtgacaaccaaaaatgtttccaggaattgataaatgtcttcctctctttttttcattatttttcaccagggatatgaaaagaattagatggatacaatgctcccattataaaacttgcatccaagagtttatattatctttttctcactagtctgctcttggtctcatgggcatagtgtcactaaaatatttaaaggcaggtgggagagctcgattacttgaacagagtatattaggtttcaatttttcttttatctctttattgaaaaaaaatagtacatttttaagactgctgcagaataagtactgagacaaacgtatgtgacatcatttgcattctggttgcctgaaccattaaaagatagttctacggccaccattctgagaggctgaccttgaagtcttagagacctatgtccaaggcctggtgcccaattacttcctgaccttatgtacttgtcttttaaactcctgaatttgttttctatcctgtgtaacaaactactacaaacttagctgctaaaaacaacatccatttattatctcatggttttttaagtctggaggtagcaaaacctagtgggggtgggggtgagggggtggtctctctgggttctctactcaagttctcaccaagctgaagtcaagctgctggccaggctatagtcctatctgaaggctctggtgtagaatccacttgcacgcttattcaggcttttggcagaaatcagttcgttgtggtttaaggactgaggtcgcctttctttgctgctaactgttggccaggaagtactgtcagctactacatggtacttgctggtccttgcacatgaccccctccaccttcaaaccaggattgacacagtgtgttgagtctttcttgaagacttttgaacatctgacttcccattctgccactagccagttaaaattctctaattttgaaggactcacctggttggccaaacccacccaaataatctccacatcttgaagtcaactgacccaggactttacatatgcaaaatcccttcacagcagtacctagatgagtgtttgcttgaataactgggacacaggaatcttgggggagccatctttagaattcgacctcctacaacccttctggaaatctgagagtgagtcaggggaagaaaccctcttttgtagtttccttttagggctttctactttgctcaaagttgggcactatttcacttcagtagggtcctgcaagccccatgagggtagtgagtgctgtcctaggaaacagtaacttaaccctgatacccatttgtccaagaactctaaacaggctaaacataagagtgttgaattcataagtgaattcatttatgaaaaattttattgtttccgtgaaatgatttaatatttactttgttttcttttattggagttttaatttagtggcaacagatagtgaagtctccatgccctgcatccgaccgtgacatcccaatcattgctaggagctggattataggcttcacaaaagtgagggggtagaaatattttaattttgtttttaattacacaataacaaaagctattacaaaccaggaaagaataccttaaaattaattatcagccagaataagtttctcagaaaggcctttcaaagcttaatcaagataaaatgaaaagaacataaaattaaattttaaaaaaaaatctactaaaagacaaaataattcagagaacatgaaaaaaataacttatgagagaataagggctccaaattagatacttctcttgaatcattgtcaaggacacatcctacttgaattatgatcaaaaacccatatcaatctctctctaccagaaaatgaaaaagaatgactgaagttctctttcgccttccagatatgactcaattcccaattttatgacaactttcatgctgttttataaaataccagatgaacaaatcaatgtcaacttgtgaacagacagtctgggtgtgagccaggtatttgatgccagtcttagattcatgcatttgaagattctctaccttctaggaaacaccactaacctcaaggatagaatacagacattgtcattctatttaaaaaaaaaaaggctcttaagcgtatttataagttagtatgtaccccaagattattaatttctcttaagtcaaaaagaatctcttcaaatgagacactcctttaaatttaccaaattacccacttagcatcaggtgatataataaacatccatattgtttgttagttgaccttcccagttaacatgttctcttcttctcataacagcattcgatttttcaatggagaaactttctcccttcttccaatccatttgccttaggagagaggacaatgagcccatttcctagttctgctgaaaaaaatatatatgatacaggccaggcagatgagaacattggctaccctagtctcagtaactggttcaagaatagactaataaaatcagccaggccaacatgacagatatcttggagctttgttaaaactgttgataaacgaaggctttaccatgaatgttgtctaactggtagaagggaaccctaggtctgctggtatcatcttgccactgtgaagaaagaggcttcctgggaatgaagccaatccaaagaaatgcagagccaagggatagagagagaaaaggtcttggaaccattgtttgagcacctggatccagcttcacttgagcccattacacatgtaattgtcatttacatgataaaattgattcactttttgcattgagtcagtttgagctggggttttttttgtcatgaaaccacagagttatgactaatcactttgtctggaaagaccatcacagctgctatataccactattctcagtgttttctttgtttgtttgtttttgtttgtcttcttcttcctcctctgctttttctatacaaactatgcaagctccccactctgggcttggttcactcactcccaccaatctgaaataccctctgtttcacagcccatattaagttccaatcccaagaagccattccaatctgctctaacccctgttgcaaaccacaccacttgttgttacaccatcttatgttgttcgtgtgccagttatctatcagcaagttttgtccccaaatgccctccaggatcctagaataaaatggttctccatcaatccccatagttttaacacaatgttcagctcaagtatccagcacctctcacccctgggctgctgataaagcttcctacatgaactatccatgcccacactgccctctttactctgttcttctcctcagcttacagacatgcctgctggaaacgctttggtacattttggatgttccagggatcatatccaaatgctgaaaatggtctccaaagctctacgggtgtggtctaccgagctcccctcctgctttctctctctgctccagtctcacccaagatcttcaatccccaccacttgccatgctctcctatcacaggacagtacatgctgcccactttccccttagcacttgccttacctttcttttcctaactcatgctcattttttagactttagcacaatcttcatttccatggggtaatttccataactctattgatcaaattaccttccccctactattattataagctttcctggctccatgaccactctttcactgtattttcaaatttagcattatatacagtaatataaatacatacatgtatgggtattttgttaatgtctctccctactttatgataagccccatgaaattcagcaccatgactatattttctcaccattgcattaccagcacctggaacaagtaacatccttcatacgtagtgggcacttaaatagaaattggttgataccaccataaaaaagaatgagttcatgtcctttgcagggacatggatgaggctggaaaccatcattctcagcaaactaacacaggaacagataaacaaatgttgcatgttctcactcataagtgggagttgaacaatgagaacacatggacacagggaggggaacatcacacaccggggccttttgggagatggggggtaaggggagggagagcattagggcaaatacctattgcataaggggcttaaaacctacatgacgggttgatgggtacagcaaaccaccatggcacgtgtatacctacgtaacccaaacctgcacattctgcacatgtatcccagaacttaaaattttgaaaaatatattaaattgctaagacaaaaaaaagaaatcggttgaataaataaatcatatagttggaataatgcaagtattgctgggtagatggaagtgtggacagaaagaaaaatgatggataggaggaagaatagaggaaggatggatgaatgaaatcgtggttggattcatttttatcctccatgtaggaaaacgtgtgtttttcctacaatttagaaactctgtaaacaagtaaaattcttaagaaactgtcacagacttgtctataaatacaagctcttagatgagacacactagttgcagagacctaaactgagagcaggacaacctgttaaacaatagaaagcttgagaaccacagggaagcctggaatcattgattattttgccctgtgagtgacagtcaccaaccatgtaattttgatacctactgccccaattctgtaattgagctacatgtttgcttctagccaaaatagcagctagacaaagagtatttatattatcacagaggcttttcttgtagatttctaaggcgctgaagtaatattttattaatatacattttctttgtgtgaaaagtaataaagtttcacaggctcaaggcatttaaaaacaaccatttcattatgccttgtctctatccaggtaagtcaagctatggcgaaaatggagaaatctacaaaggtaaaacattttattcttacaagtcacgtcacctatggatgagttcctatgcatgtatgaaaacacacatggatggtgaagatttggattttttcacataagagtttagctgtttagtctgggcatggtggctcacgcctgtaatcccaacactttgggaggctgaggcaggcgaatcacccgaggtcaggagttcaagaccagactagccaacatgacaagaccctgtctctaccaaaaatacaaaaattagctgggcatggtggtgggcacctgtaatcccagctactcgggaggctgaggcaggagaatcacttgaacctgggaggcggaggttgcagtgagccgagattccaccattgcactccagcctgggtgacaagagtgaaaccagtctcaaaaaaaaaaaaaaaaaaaaaaaagaagagtttagctgtctaaacccttacagcatggaatatgcacgacagccctgaaagctaggtattattttaacccaggactctccctaccctaaacttaaaatcatggtgattctcacctatgaggtacatcagaatcaactgaccacaagtactaaaagattcctgcgccccatccccataggatgttgttcattaggtctggagtgaaattctcaaacttgtaattttttttaactttttttttttttttttttgagacacagtcttgttctgctgctcaggctggagtgcagtagcacaatcataggtcactgcagccttgaactcctgggatcaagtgatcttcctgcctcggccttagctaggaagatatcactacactacacaccactgtgcctagctaattttttaaaatttgtttagaaacagggctcactatgttgtccaggcctgttttgaactcctgggctcaagcaatcctcccagctcagcctcccaaagtgctgggattacaggcatcagccactgcacctgacctgaaaatatttttaaagtgagtcagttctattcaagtatggtctgtctatgaaatggcatgctatggagactgaaaatagtgtgaaacctgcgtgtacattggtgtggatggaaacaatatgatgttgaatgaatgaaggctataagatggtctcattttaattaaatgtttcacatacacatttatatatacatatattcacatgtctgtctttgctttatgtgcaggaaaggggtggaaagtgggtatgacaaaggcattagcagtggctatctttgaagaggcttactacttttgtatttttgcttgacaacaatttctgactttagttggacacacattgtgttatcataaggggaaaagcagaaatgaaaaacaccataggaagaaaaatcagtcaatgtaatcaagccgttagtcaattcgttaggaaggaaagttaaaagagccaaatcaatgggcatcatttaaagataacaacctgttcgctgctttgaccaaatattttaaaggtactgctttgacattttattccaattttgatggtttttattatattttaataagtacatatttacttgtcctgtgagacaagcactgtactagatggatgtgttataagagaaaaccgaggagatacgaatcttccgaatttatgtgctttcaggttcagttccagacaactgcaataaagcaaatcatacaaattttgtttcccagtgcatataaagttatattcacactacattgtagtttattaagagtgtgataatattatatctaaaaagcaaaaagtgtataatttaaaaatgctttttgctaaataatgctaatgatcatctgagctttctgcaagtgataatcactttgttggtagagggtcttgccttgatgttgatggctgctgactaaacagggtggtggttgctaaaggctggagaactgtggcaatttcttaaaataaggcaacaatgaactttgtcacattgactgactctttcatgaaagtttgctctgcagcatgcaatgatgtttgatagcattttacctacagtagaacttctttcaaaattggcgtcaagcctcttaatccctgttgctgttttatcaactttgtgtaattttctaaatcctttgttgttgtttcaacaatgttcatagcatccttaccagaagtaaatttcatcccaagaaaccactttctttgctcttctgtaagaagccactcttcattcattcaagttttatcatgagattgcagcaattcagtctcatcttcaggctccacttctaattctaattctcttgtcgtttccattacatctgcagttacttcctccatgatgtcatagacctctcaaagtcacccacgcaggttgaaactgacttcttccaaactcctttaatgttgatattttgacctcctcccatgaatcatgaatactcttactgatatctagaatggtgaatcctttccaaaaggttttcaatttactttgcccagatccattagaggaatcgttgtctatggcagctatatccttatgaaatatatttcctaaataataagacttgcaagtcaaaagtactccctgatccatgggctgcagaataaatgttgtgttaacaggaatggaaacactaatctccctgtacatctccatcagaactcttgaatgactaggtacattgtcaatgaacagtaatattttgaaagaaatttgtttgagcagtaggtctcaacaatgtacttaaaatattcagtaagccatgctgtaaacagatgtgctatcatgcaggctttgttattctatttataaagttcaggcagactagatttagcataattcttaagggtcctaggatatttggaatgttaagtgagcattggttttaacttaaagtcacccactgtgttagagtcagcctgtcctttgaagccaggcattgccttctcctctctagccatgaaagtcctagatggcatcttctactataaagcagttttgtctacatttaaaatttgttgtttagtttaactattttcacccactatcttagctagatcttctagataacttgctgcagtttctccatcagtactttctgttttgtcttacacttttatattaccgaaatggcttcttttcctaaacctcataagccaaactcagtagcttttacttttcttctgcagcttcctaacttttctcagccttcatagaattaaagaaagttggggccttgccctggattaggctttggcttaagggaatgatgtggctggtttgatcttccatccaggccactaaaactttctccacatcagcaacaaagctgtttcactttcttatcattcatgtgctcactggagtagcacttttaatttccttcaaggacttttcctttgcattcatgacttggctaactggtgcaagaggcctagttttcagcctatcacagctttcgacatgccttcctcactaagcttaatcatttgtaccttttggtgtaaagtaagagacacgcaactctttcttcctttcatttgaacacttagaggtcattgcagggttactaattggcctcacttaatattgttgtgtctcaggaaatagggaggccttaggagagggagggaaatgggggaatggctggtcagtggagcagtcagaacatgcacacatttattaagtctggcatcttatatgggtacagttggtggtgccccaaaacaattacagtagtgacatcaaagaacattgatcataggccaggcacagtggctcaagcctgtaattccagcactttgagaagccaaggtgggtggatcacttgaggtctggagtttgagaccagcctggtcaacatggcaaccatctctactaaaaatacaaaaattagtcaggcgtggtggcgtgtgtctgtaattccagctacttggaagaccgaggcaggagaatcgcttgaacccaggaggcagaggttgcagtgggcagagatcgtgccactgcactggcgacggagtgagactctgtctcaacaacaacaacaaaaagaacattgatcatagatcaccatagcagatataataataatgaaaacgtttgaaatattatgagaattaccaaactgtgtcacaagacatgaagtgagcacatgcttttggaaaaatcagggttgccacaaaccttccatttgtaaaaactgcaatctatgaagcacaatcaaagaaagaacaataaaatgaggtgcgcctatatagaggttgttttataatgcatatacttttatttttttctcaaatgtaaacactttttgaaaaaaaattcaaatgaatcaaaacaaaattctaacaaacaaaaaccataacaaagaaagttaagcttttgaaatcttaccattccaagacaaccccagtaaactttttggtgacatcctgttagctgtttttatataagtattttcgtgaccaaccaactttattaatccaggactgacagacttctctaaacttgggccttttggtactaaaccacggacagtcccaggcaaactaggatgctggttgccctagatgtagatgtaggtttatattaccatttcaatggtgtcatactacagagtgtttcattatgtggatttgccataactcatttaagcagaatcactagtggagatttaggttgtttctaattttatttatttatttttttaatttggctgaataagtctttaataaatatgtgtgactttcagtagaaaaacagtcaatacagatgcttgttggaacccaggaaccactatttactacttgtgcagtactaggaaagttaatatattttttattttattattattatactttaagttttagggtacatgtgcacaatgtgcaggttagttacatatgtatacatgtgccatgctggtgtgctgcacccattaactcttcatttagcattcggtatatctcctaatgctatccctcccccctccccccaccccacaacagtccccagagtgtgatgttccccttcctgtgtccatgttttctcattgttcaattcccatctatgagtgagaacatgcggtgtttggttttttgtccttgcgatagtttactgagaatgatgatttccaatttcatccatgtccctacaaaggacatgaactcatcattttttatggctgcatagtgttccatggtgtatatgtgccacattttcttaatccagtctatcattgttagacatttgggttggttccaagtctttgctattgtggatagtgccgcaataaacatacgtgtgcatgtgtctttatagcagcatgatttatagtcctttgggtatatacccagtaatgggatggctgggtcaaatggtatttctagttctagatccctgaggaatcggcacactgacttccacaatggttgaactagtttacagtcccaccaacagtgtaaaagtgttcctgtttctccacatcctttccagcacctgttgtttcctgactttttaatgactgccattctaactggtgtgagatggtatctcattgcggttttgatttgcatttctctgatggccagtcatgatgagcattttttcatgtgtcttttggctgcataaatgtcttcttttgagaagtgtctgttcatatcctttgcccactttttgatggggttgtttgtttttttcttgtaaatttgtttgagttcattgtagatgctggatattagccctttgtcagatgagtacgttgcgaaaattttcttccattttttaggttgcctgttcgctctgatggtagtttcttttgctgttcagaagctctttagtttaagtagatcccatttgtcaattttggcttttgttgccattgcttttggtgttttagacatgaagtccttgcccatgcctatgtcctgaatggtaatgcctaggttttcttctagggtttttatggtttaagtctgtttaagtctttaatccatcttgaattaatttttgcataagatgtaaggaaaggatccagtttcagctttctacatatggctagccagttttccaagcaccatttattaaatagggaatcctttccccattgcttgtttttctcaggtttgtcaaagatcagatagttgtagatatgcggtgttatttctgagggctctgttctgttccagtgatctatatctctgttttggtaccaataccatgctgttttggttactgtagccttgtagtatatagtttgaagtcaggtagcatgatgcctccagctttgttcttttggcttaggattgacttggcgatgcgggctcttttttgattccatatgaactttaaagtagttttttccaattctgtgaagaaagtcattgatagcttgatggggatggcattgaatctgtaaattaccttgggcagtatggccattttcacgatattgattcttcctacccatgagcagggaatgttcttccatttgtttgtatcctcttttatttccttgagcagtggtttgtagttctccttgaagaggtccttcacgtcccttgtaagttggattcctaggtattttattctctttgaagaaattgtgaatgggagttcacgcataatttggctctctgtttgtctgttattggtgtataagaatgcttgtgatttttgtaccttaattttgtgtcctgagactttgctgaagttgcttatcagcttaaggagattttgggctgagacaatggggttttctacatatacaatcatgtcatctgcaaacagggacaatttgacttcctcttttcctaattgaataccctttatttccttctcctgcctaattgccctggccagaacttccaacactatgttgaataggagtggtgagagagggcatccctgtcttgtgccagtcttcaaagggaatgcttccagtttttgcccattcagtatgatattggctgtgggtttgtcatagatagctcttattattttgagatacgtcccatcaatacctaatttattgagagtttttagcatgaagagttgttgaattttgtcaaaggccttttctgcatctattgagataatcatgtggtttttgtctttggttctgtttatatgctggattacatttattggtttgtgtatgttgaaccagccttgcatcccagggatgaagcccacttgatcatggtggataagctttttgatgtgctgctggattcggtttgccagtattttagtgaggatttttgcatcaatgttcatcaaggatattggtctaaaattctcttttttggttgtgtctctgcccggctttggtatcaggatgatgctggcctcataaaacgagttagggaggattctctctttttctattgattggaatagtttcagaaggaatggtaccagttcctccttgtacctctggtagagttcggctgtgaatccatctggtcctggactctttttgtggtaggctattgattattgccacaatttcagagcctgttatttgtctattcagagattcaacttcttcctggtttagtcttggtagggtgtatgtgtcaaggaatttatccatttcttctagattttctagtttatttgcgtaggggtgtttgtagtattctctgatggtagtttgtatttctgtgggatcggtggtgatatccgctttatcattttttattgcatctatttgattcttctctcttttcttctttattagtcttgctagcggtctatcaatttgttgatcctttcaaaaaaccagctcctggattcattaattttttgaagggtttttttgtgtctctatttccttcagttctgctctgattttagttatttcttgccttctgctagcttttgaatgtgtttgctcttgcttttctagttcttttaattgtgatgttagggtgtcaattttggatctttcctgctttctcttgtgggcaattagtgctatcaatttccctctacgcactgctttgaatgtgtcccagagattctggtatgttgtgtctttgttctcgttggtttcgaacaacatctttatttctgccttcattttgttatgtacccagtagtcattcaggagcaggttgttcagtttccatgtagttgagcggttttcagtgagtttcttaatcctgagttctagtttgattgcactgtggtctgagagatagtttgttataatttctcttcttttacatttgctgaggagagctttacttccaactatgtggtcaattttggaataggtgtggtgtggtgctgaaaaaaatgtatattctgttgacttggggtggagagttctgtagatgtctattaggtctgcttggtgcagagctgagttcaattcctgggtatccttattaactttctgtctcgttgatctgtctaatgttgacagtggggtgttaaagtttcccattattattgtgtgggagtctaagtctctttgtaggtcactcaggacttgctttatgaatctgggtgctcctgtattgggtgcatatatatttaggatagttagctcttcttgttgaattgatccctttaccattatgtaatggccttctttgtctcttttgatctttgttggtttaaagtctgttttatcagagactaggattgcaacccctacctttttttgttttccatttgcttggtagatcttcctccatccttttattttgagcctatgtgtgtctctgcacgtgagatgggtttcctgaatacagcacactgatgggtcttgactctttatccaatttgccactctgtgtcttttaattggagcatttagtccatttacgtttaaagttaatattgttatgtgtgaatttgatcctgtcattttgatgttagctggttattttgctcgttacttgatgcagattcttcctagtctcgatggtctttacaatttggcatgattttgcagtggctggtactggtttttcctttccatgtttagtgcttccttcaggagctcttttagggcaggcctggtggtgacaaaatctctcagcagttgcttgtctgtaaagtattttatttctccctcacttatggagcttagtttcgctggatatgaaattctgggttgaaaattcttttgggttgaaaattcttttctttaagaatgttgaatattggcccccactctcttctggcttatagagtttctgctgagagatccgctgttagtctgatgggcttccctttgtgggtaacccgacctttctctctggctgcccttaacattttttccttcatttcaactttggtgaatctgacaattatgtgtcttggagttgctcttctcgaggagtatctttgtggtgttctctgtatttcctgaatctgaatgttggcctgccttgctagattggggaagttctcctggataatatcctgcagagtgttttccaacttggttccattctccccgtcactttcagatacaccaatcagatgtagatttggtcttttcacatagtcccttatttcttggaggctttgttcgtttctttttattcttttttctctaaacttcccttcttgcttcatttcattcatttcatcttccatcactgataccctttcttccagttgattgcatcggctcctgaggcttctgcattcttcatgtagttctcgagccttggctttcagctctatcagctcttttaagcacttctctgtattggttattctagttatacattcgtctaattttttttcaaagtttttaacttctttgcctttggtttgaatttcctcctgtagctcggagtagtttgatcctctgaagccttcttctctcaactcatcaaagtcattctccgtccggctttgttctgttgctggtgaggaactgcgtccctttggaggaggagaggcactctgctttttagagtttccagtttttctgctctgttttttccccatctttgtggttttatcactttggtctttgatgatggtgatgtacagatgggtttttggcgtggatgtcctttctgtttgttagttttccttctaacagacaggaccctcagctacaggtctgtttggagtttgctagaggtccactccagaccctgtttgcctgggtaacagcagcagtggctgcagaacagcggattttcatgaaccgcgaatgctactgtctgatagttcctctggaagttttgtctcagaggagtacccagccgtgtgaggtgtcagtctgcccgtactggggggtgcctcccagttaggcttctcgggggtcaggggtcagggacccacttgaggaggcagtctgcccattctcagatctccagctgcgtgctcggaaaaccagtgctctcttcaaatctgtcagacagggacatttaagtctgcagaggttactgctgtctttttgtttgtctgtgccctgtccccagaggtggagcctacagaggcaggcaggcctccttgagctgtggtgggctccacccagttcaaacttcccggctgctttgcttacctaagcaagcctgggcaatggcgggcacccctcccccagcccggctgccaccttgcagtttgatctcagactgctgtgctagcaatcagtgagactccgtgggcagaggaccctctgagccatgtgcgggatataatctcctggtgcgccattttttaagcccatcagaaaagcacagtattagggcgggagtgacccgattttccaggtgccgtctgtcacccctttctttgactaggaaagggaactccctgaccccttgtgcttcccgagtgaggcaatgcctcgccctgcttcgactcgcccacagtgcgcttcacccattgtcctgcgcccactgtctggcactccctagtgagatgaacccggtacctcagatggaaatgcagaaatcacccatcttctgcgtcgctcacgctgggagctgtagaccagagctgttcctattcggccatcttggctgcttccctcagttgtttctaattttaagccactgttcctgttataaaccatctgtgatgaacctcctttcacatacatctttgcacacttgaaaattatctgtgtgggataagttttttaaatgaagtttctaagagtacatacgtattacattttgctatatactgccaatttatcctattttttaatattttattaattcacacctttgatcagttgagcatgagactgacagttttttcatatcctcatcgattctgagttttgccaatcttttaaaatcttttctaatccaatgggcaattcacttcaaattcttaatgcatatatttattttatggacagagtattattatttttctgtccaaaaagtcaaatgctttattatgaagatgccatttaataatctatttttaaaagtttcattgaatataacttacatactacaaaattaacctgttttaagaatacaagtagacaaattttagtatcattacagagttgtccgtcatcaccaccatctaattttggaacattttcatttctccaaaaagaaaccttgtgcccgtttacagtcgctccccatttccaccccaagcctcgtttaaccacaaatctttccatctctgcatatcccagaactaaaactgctggccttacatagtgtagggtgaccatcctggtctgcccaggactgaaggatttccagggtcatggggtgtccagtgttaaaacctggacggtcctgggcagaccagggcaagtcggtcatttgaccatagtgctttttttaagccaaaactttcagatctccttttcccctcttgcgtttcgtttgacctctgcctcatggggtggcctaatttggtaggtcaggcaaagacactgtacaaagggacacccctaaaaatcaaggactgtaaaacattctgatttgaagagaatacaacaacgaagctctccacaaggagccccttctgactctgaaacaattggtcatcttagttaaattattggcacacattggcaacaatgactgtttgatgttcctcacacgatccttctccatccagccataacgttgagatcagagagtcagtacctcaactacaaccagaaataagaagaaggaagagggatattgcagtactgcaagagcaattactgagtgcctggtatgtgctacagactgttctgcatcctcttcttcaatccttaccaccccctacccagaggttagtatcatgaatgccactctacaaacgaggaaactcaaacccagacaaataaagtcacttgcccagggcacacagcttgggtaacagaggcaggattcaaacccaagtctcagcccaacaccaaagcctggattcatactgttatccgcatggcctcctggaagcaatggagggactaaataccttaattgagaatatagaaagaaatatactttctaagtttacatcccttttccaacaaacacagaaacacaaaaccacttcgagggggtttttttccccaaaaaatgccttctctccagtgaaatagtattaaggtgacgggggtgctgaggaggaggggggttgaaggatatgcaagtaacaggaaagccaatataattcaaagtgaaattgatttaaaattttgctaagattttttatgcttgcatatttcacgcttatagcatacctttggtcttatttacagttttaattaaatatacacttcattattttacatagtgtataaaaatatagttctatgtaaatatttcttagggagatctgtaaaagtgtctcttataattgatatgacatttcaaaatacacagtgtttcataatcagatacatttcctgagcttaatggtagaaggcacctcacatttatatttactagtttttaattatcttattatctatagttgtgatttacccagatttacccagacaggagatctgggaagtaatatatttgaatttactggataatttgcatttatctttgcctaaaacttttctccttcttagaataattggaggagagagagataaaaacctcagccttgctcttataccaccaacagataccgatccttctatacatcaatctgcagcaaaacattgcttggccataaagttgaaacatgcagccaatgtcagggctcgcatatttaaacccacagcactgagaatatacacataaaagtctaatatgtcagacttaaaatttctagatttcactggtaactactggcataaaagggtggtatgaggagaaccacctgaacttggcttatgcctactttatctgtatctgaaaatgagaacatcagtcttttggccataaacaatttgtgtttaataacactgtatattgttgtttttcaaacactttataatgtgggtggatttttaccactgcccccagcttgcctgcttaatttgctgttgattcagcctggccctggtccatcaacctgaataagagattacaaagtggagagaattctcctgcacatgaaagcagggctttctcttctgggttccaggaccaaccctgtgttgagaacaggaaggatgcttacaagagataaggtgatggaaagaaagaaggctcgcctgggagtttaagtgttaagcttaaatgtgctgaacagcctctaagtatagatgagcttcaccattgcatgaggatggtcggtgtgtggttgaccgttgcacggatcccatcccagatggcagtgagaataaccaatagagctccttagaacagcataaaggtgtattttattcattcttttatctgttaaatatttatcaggcaaaagctccacttgctcaaatataagaatctaatgatgggtattaacactctctcagctcatgacaacacaagtcaaatgaaaaaaaacaagtgaataattacatatgtgacttatagattagctgaactctttgaaatgttttaaatcattatttaaagtattttcccccaacttaattgaattagcctagctatgctttcagatgtattccgcaaatatttattgggcacccactgagatcagggctctgggtaagcactaaggatgaacaatgaacaaaagagacctaatcctaatctttatgggagctacaatataatgttgggccagacattatctttagaaactgtagtgagtgttgtgaaagaaaagaagaggatgctacagatatttatagcaggaggcctcgatctaggcttcaaagcggaggtcaggaggtgcaaggaaggcatcccagagaaaatgatgttgagctgaaaactataagaagaagaaagggggaagaaaggaaggttccaggcaaagtgaattgcatattcgaaggccaggaagcaggaggagcctggtacatttaagcaagtggaagagggctggtacagctgctatgcaaaattcaaaagggaatatggtttaagatgaagctaaagaggcagagaagaatcagattctgcacatctggtaaggaacttgatcttcctccttgaagcactgggaagtcatcctgggaatttaggctgggaatggtagacagaataatgtctccttctcacaaaaatgtatgcatcataatccctagaaactatgaatacattaccttgcatggcaagagacatcgcaggtgtgattaaattaaggatcttgagatgtgaagagtatcctgggttttccaggtaagtccagtataatcagtgtcctaatatgagaaacaggaagttaggagagtcaaaagcatcctttcctgaagcagttgtatgggtttctttgtgtccaagtttatagagatagagatgtaatgatgaaagaaaaggtcaggggtgaggggaagaaagatggagagaagggagggagagatttggggtggcaacactgctggctttgaagatttgaggttgctacattccttggctctggcttgaccaagaaccaaggaattcaggctacttgtgaaagctgaaaaaggcaagaaaatggattctcctcaataggaatgcgtttacactgttggtgggagcataaattagttcacccattgtggaagtcagtgtggcgattcctcagggatctagaactagaaataccatatgacccagccatcccattactgggtatatatccaaaggattataaatcatgctactataaagatacctgcacatgtatgcttattgtggcactgttcacaatggcaaagacttggaaccaacccaaatgtccatcaatgatagactggattaagaaaatgtggcacatatacaccatggaatactatgcagtcataaaaaaggatgagttcatgtcatttgcagggacatggatgaagccaaaaaccatcattctcagcaaactatcacaaggacagaaaaccaaacaccgcatgttctcattcataagtgggaattgaacaatgaggacacatggacacagggcagggaacatcacacaccggggcctgtaggggggtgggggctggtggaggaatagtattaggagaaatacctaatgtaaatgacaagttgatgggtgcagcaaaccaccatggcacatatatacctatgtaacaaacctgcacgttgtccacatgtaccctagaacttaaagtataataataataataataaagaaaataaattctcctctaggaccctccaggaggattacagtcttgctgatacctcaactctaggatttctgacatcaagaattgtaagataataaatttgtgttgtttaaagccacccgtttgtggtgttttgttacagcagcaataggaaactaaaacaacgggcaatgaaaaatgatcagatgtgtgtttttagaaagttgttctggcaatggtatggagtgaaaggagagagttttgctggaaaacaattgaaatggtttggttgagagatgatggaagtttggaccaggaagttggtaatggctttaggacagtttttcagcattagcactattaaaattttgaactaaaatcatttgtgtgtgtgtgtgtggcggggtgcatatgtgtgcacgcacactatggggttatctcatacattgtaggatgtttagcagctttcctggcctccatctactagataccagtagcacctccacccaggtgtgacaactaaatatgtctctagacattgccaaaagtccgctgtggggaaaagttactcctagttgagttctgagtcagaaaaaattagacaaaatgcataggtatttaagtgttggaattaaaaggactaattgttcaaccctatcaatcagtcagtgttttataatcacatacatttcctgggccgaatggtagaaggcacctcacacttacatttgcttgtttccatactgatataaaactcatttttatagtgatattatatatcactataattctatattttacagtgatattatctatcactgtaattctatattttatagtgatattatctatcactgtaattctatattttatagtgatattatctatcactgtaattctatattttatagtgatattatctatcactgtaattctatattttatagtgatattatatatcactaattctgtattttatagtgatattatatatcactataatatacaattaattcaaatataagcaaatattatctttgtaatcaaactttatttttaaagttctagaataagtactcaaaaggtaatgaaaagttttgttcctctaatctccctattcctcattgaccctttcacttggcaattagcaaacaccactgctgtcatttcttcagctgccggacagctggtgatgaggggcatccttctccaaagcagttgtagaggtctcttaaggtcctgaaaggaagagttccagaggacagctcccaggaaaaagagaactctcacaggctccgattaagtgtgttttcttctttagttcttctacttaaaagaaaaataaaagccttattgagatgtaactcacatattacaaaatacccccttttgaactgtacttttcagtggtttttagtatatccacaaggttgtacatcccctaattctagaacactttaatcacccaaaaaacaaaacttcatatcaattagcagtgaatcctcatgttcctcctcctctagccctgtcaaaccactaatccattttctgtctctacagattttacatacatggaatcatataaaatggacatttcctataaatgaaatcatacaataggtagtcttttgtggcttctttcacttagcaccatgtctttgaggctcatccatgtcatagcatggatcagtaattttttttttattttttttttgagatggagtctcactctgttacccaggctggagtgcagtggtgcgatctcagctcactgcaacctcagcctcccaggttcaagtgattctcctgcctcagcctcctgttttcctttttatgggtgagtaatatttcattgtatggataaaccacattttatgtatccattcttctgttgatggatatgtgggttgcttatgcttccctttggtttattggtgagtttgtcccctaaaggtgactcagcgggctgaactccttcgtggtataaacaaattaaaacttcccatcctgacccatgcctgaagtaaaggaataattgattctgtcacccaacacttattacacacctcatgtatgtcagtttgagggctctgttttaggccctggggatgatcatgatgaataaaacaaattccttactgtcagtgatatttcattctagtgggagaaattaggaaatgaacaaaccaagcagaaggaaaattcatttactcaaccctctgttgaatatttaccaaatgcaggcacctaccagtactgggtagacacagacccaaatagaggagggacagagttcatgcccatgtttcccccgggaaagcacaaacacacaatgatgatagaatgtgctgggggctataatcaatgtctcagctgaaatctttaggaaaagacaatagaggaattttttaaaggcagagaaggccaggcacggtggctcatgcctgtacccccagcactttgggaggccgaggcaggcagatcacctgatgtcaggagttcaagaccagcttggccaaaatggcaaaatcccatctttactaaaaatacaacaacaacaacaacaaaaattagccggaagtggtggcaggttcctgtaaacccaactactcaggaggctgaggcaggagaagcgtttgaacctgggacgtggaggttgcagtgaattgagattgtgccactgcactccagcctgggtgacagagcaagactccatctcaaaaagaaaaaaaaagccttcagagaagaggagcacgttgagctgaaccctgaagagcattcatgtcttcgtggggtggggacacgaaggagaatctggtggaacaaaagaaaggacggagcccacatgctacagagcaaacaccttccctcttcaggtaagagagtatgagcagttgctgcagctcttggtctggatttgggtttcattctgcttggctcccagttttgctttcactccatttcatctttggtatacagggccctcctatgcaccaccaggtctcctgcatgatatgtttgggcttataatgtggtcattgatgatctggtatgtgtccttctctcggtaactatccctgtgagaagtgctgaaatgaacagcctctggtgcttcttgcttggtctcagcctcacaagagtcctttgtgaacaagaaggcagcagacctgtgtgacttggagaggaggggacccaaggttccatcctaatccagccctcatacccaaagaggcatattcctctgcttctcccatattgatcaggaggctcactctggaatcagacggcctcacctggctccctctacatgaatcccagccctaccactgaattgggcaaattagttaagcctcagtgctctcataagcaaaagggagatcaaaattaatccttgggggcgtctgttctaaataagatcatcattggtgagcacccctcacaatgtccagcatggagtaaacagttgataaatgttagtgttaattttcttttcactttccatggcctttcaacccagcaccaagaacctgaagagattacatgggcctgaacataattgaaaggcattattcctttcttttagaactccaaatgtaactattatttacaggataatgttcaaatattatggaagcatttaattttaattgatctatgcacatgaataaatgaagttaacaacaaaagtggtttgaatttaactttatgttttaatacctgagcaaattctcaagtcctagggattccaaaaaatgctgcatacaaatacaagcagaaatgacagcactgaccccttttctcctgtaacatttaacaatttgcaaaacacattctacctactacctggtttttccgggagagcagaaagggatccattgaggttgatgcccagatgtcctctaatagtctcttgccctggattggctcacaattccttttttggaatgtaggtactaaaaagccattcacatgccaaataggaggagttctcctctctttgtgatactcagtgcctcctgttccctgccttggcctcatcttctatcatccctctgagccaaggcattacagctgttaagtgtgcaatctctggagtcacactgcctaggtctcaattctgctttggtttcctcaaacgatgcaaccctctgcaagttatcagcctctgtgtgcctcagtctcatcctctgtaatacggaatagtatttgtatatgtcttgctatgatattccttcagggttgacaggaggtttgaattagaaaagacacatagggatggtgctcaaatgtcactgctgactcttcccccacctatattccttccatcaggggctagaacaggcacctgagaacacagtaggctctcaatggaatattcagtgaatcttttttttctattttactgaaggatctagggaggtgtctgaagcagtaatttcatatattctctaagaatgtctcaaggggaacaatggggaaagaaatgaattcttagaagttattgcatgaaaaagacacacacgtgtttataacagcacaattcacaattgtaaagatatggaaccaatctaagtgcccattgaccaatataggtggataaagaaaatggggtaaatatacaccctgaaatagtactcagacataaaaagggatgaaataatgtcttttgcagcaacttaaatggagctggaggccattattctaagtgaagcaacccaggaatggaaaaccaaataccatgtgttctcacttataaagtgggaactgcactatgaggatgcaaaaacatacagaatgatgtatcggactttgggtatttggggaggaaggttgggagggggatgagggataaaagattacatattgggtagagtgtacgctgctcgggtgatgggtgcactaaaatctcagaatccaccactggagaattcatccgtgtaaccaaaaaccatctgtatccccaaaactactgaaattttaaaaatacagtagaaaagaaataaattcttaggaaaaaaggcacaaagcacattaatttacgcagcaactcgtatataatgagcaggttcaataacagataattatatggaaagtacttaaatgctaactatgtacttttaatatgttgcaaaagtaggttcataattaaattataattacaagtaaaaatggagacaatgatcattccctgagaaatttgcacatttttatttccaaggttatgtgcagcttctctcacactctgattcattacttttgttggtagctccactctgatctgactcgttttgcatgatggattttaaatttaaaattaactagaattatctttcagattactaattaccatatgcaatgatttcaatagaatacccaggttgtcattaaaaagtagtttgtgagcatgtaagtttgaaattgtggaagatttatagtggaaagaaaggggaacattggccgatcatctaatagaaactaaacaattggcagaaattgagaaagctttaaaacaagttatgaattacttgtgggaagggatacgcataactattactgtggcaaagtcacaagacttttcaaaacttgatatcatttataactcatccagttgcaagtgaaagaagcacatctgaattgtcgaagaaaaagagaaagatttattagttcaaaaatctaataaaaagttcaagagtaactaatttcaggtctggcaggatccagagtctgaaataatgtcactaaggtttaacttgtcactacctccaatacccaattctggttttctcaatggtcatttttctcagacagggactccccatatggtggaaagaaataactgtcagatgcaccagattcacatcctcaaagctgaggaagcccagtggaagacgagtggattttttttctaagagcttcaggaagtctcaggtctgaatctcattggttcaaagacagtcaaattgccttatctgaaccaatctctgtggtaaccagggtagtgctgtgctctgattggccaagagttacatgtcctcatctggagctaaggttatcatccactaatttataggggctgagattccaaagggaaattgagctggtgcttccagaagaaatacaaagagatgcctggatgccaaaagctctctgggtgaacaatgaacttaaccagactttgttctctttctctccttttcttaaacttaatcttaattaaataagggtttccatctctgctcagctattccttaccccaaaatgagtcctcttgccatttggtcaaatcaatgcatttaaactaacatatgttttatgtgggccagagaaaattttttaatgcacatctgaatgtgttatcatttctctgccaccaccattcaccctaacttcttgctatggtaatattcacatttacacaaagtggaggaaattatgtattgaacctccataaatctattacctagcttcaaaaattataaccatttgccaaatgtattttatccataccctccatcctctacactttttatggtcagagaactttaaagcaaacctccaatgttataatatttcatatgaatatctaataaggactttataaaagcctaaccaccatgtcattttcatacctatcactgttaataatgtcttaatatcactatgagtacatgtctatatttccccttgattgactcaaagatgtctttctacagcagatttgtttgaataataaagtctgcacactgcattgtcatgatgtttaaggctcttttattctttatcagttttcccccctactttctgttattttcagatcattgcattatgagacaaccagactatgtcatttgtcctgcagaatgtcccccattctggatttagctggttgctcccttgtggtgacatttatcctgctcttctgtccctcttatttcctgaagcctggtaatttgatccagggtcttgattagattcaaggtcagttaattttttgtttgtttgcaactggttccatgtaaatgccttcccactgtgctcttacagttaacacaaacccctcctcctcatggcctgcttcactctcactagtctttcatttcattgtctctctcctgatacctctggcatgctttgattacttctctctcaccaagctcctgaacagctagaatacttctttctgctaagaatggtcatcgcttctttcctggcccagctagctaataccttgttagggaaaccatctccaactcctcatgaccaggttcaatcttcccaccaaatgctcccatagcatcaccccattctcctttgcagccttatcactattgcaattttccatttattttgtatgatttttaaaatagtatttgtcctcctctggaaactataaccttcatgaaaaaaggacagtgtttgacacatgtttgttgaaagtataaatccgtttttaaaaaatatgcacaaaatacatacacaccatcgccaggtcaatctaatttccttaggccttacccatatgatattttattgatagtaaaatagctaccagttatttttgctagttttatgccatgtaccctgatagtttattttacaccctatttgtaagcattacaattactccaccaagtggatgttaatgtcccattttacagataaggcaatgaaaacctagagaggttaagtaattcacccaaccacaccaagccagacctttgctgagccatgattatcctttatccttttaatcatcctataagacagtgtcagaggtgtttgaaccagagcaactccatcttgaataggggctgggtgaaatgagactgagacctactgggctgcattgccagagagtaaagcgttctaagtcacaggatgaaatacaagatcagcacaagatacaggtcataaagaccttgctgataaaacagtttgcagtgaagaagctggctaaaattcaacaaaacccagatggtgacaggagcgccctctggtcatctgtgctgctacactcccatcagtgccatgacagtttacaaatgtcatggcaacgtcaggaacttgccctatatggtcagaaaaggggaggcacgaataatccaccctgtgtttagcataccatcaagaaataaccataaaaatgggcaaccagcagcccttgggactcctctatggatagcccttcttttattcctttactttcctagtaaacttgctttcactttacttcatggactctccctgaattttttcttgtgcgagatccaagaaccctctcttggggtctggattggggcccctttccagtaaaaatagtgttttggttctcattttagatatagggtgaccaatcatcccattctgctgtgactgaggtgattccagaacatgccacttcagtgctccaactgggaaagacctgggcaaactgagacaagttggtcactctattcacagatgagactcgaggacactcactaattactcatgtacatgagtaattagtgagtaattagggtgctatcccacatatttcaattcctaaagcccacagcctctactatgtcacaccatgatggctaagtgttagcttgtaataaaaatgggtactccaaagcttaacctcctgaccaccatcctaattagacatttactcttttgtttcaaagagaactacaactagaaaagtttcccaatttttcactttggaatcaaaaggacttcaactttttttggtcaagattatactcttttgtgtgattctgaacccctcttcttcatggccaatggcatgacattctactgtgttctcaaaaggtaccaaatactaaaaatacagatttgtcaccataaattatcaagctcaactctaattaatcaaaagcgtggtacccggtcacctttaactgtttcttctgcatcttgatatgatataaaatgactctggagcaaattcacttatgataattaactaatctgtttatttggtttcaattttatctcaactataatgaacccactacatgccttagcccaaatagcaacagcagtattaatgagaggataattcctgcaatttggggaagattgtgcaaacaagttggaatgcctgctaaatctctgataatgttcaaacacacttcatcagacttatcagaacagtaaatcaagctaccacttaaaaaaacagctgtactcattggaatattcattcactttgaagaagaacattcagtgaaatggcttttaatccttctaggacactctaacctcaggggttctgggcaagtgatgtctttattatgcttctatgagatcactgagcttcccaattgaatctgaaatgcatttactgcaagaggcctgtctgaagatcaaatgccaggtaatgtctttgaccaagaacaattagcaaagttcgttcttccttacctcttttaccgaggagaatcattggtttgcattaaggaatatgttcagtctttattaaaatcatttgggcacctcagggaagaaaattctatgtgcttagaatctcacaaaaatgaatgacctgagcaggtagagttcatgacgagaaaccagacccaaacaacattttcatgagcagatacattaagcaagcttataaagaataattacagtgattataacaaaactcatgtctatttattaaacatttaataacatacaaaaaataaagcttattattattatcaatctcaaatgtaattaaggcaggaggttacttgcatattcttattcaatcttcaaatcaaaagagatcagtactatcgttatccccatataacaaactagaccaggggttagcaaaccatagcccatgatccaaagcctaccccttttttaaaaaaaaaaaataaagctttattgtaacacagccatgcccattcacttatgtattgtctgtgactgttttcccagtggaatgccagaattgagtagttgagctagagactgtctggcctaaaatatttattaccctgccttttataaaagtttgccaacccctaaatatgaggcttaaaaaagaaaacataaatttctaattacagattagtttcagttctacaaaggaataaaaagagatactatatgaatttattaagacagcagtaatactatttgcttaatatagagttctgtgtttttgatgcaggattttttgcttcgtagcttagctaggtcctggttcttgtctcatacccaggaagaattaggcatgtagacactcagaaagtgagtcaggaaggaagttttattgagtggtgaagcagctttcggtagagaggagcctcaagggtggtcccactacccgaaagcaggagagttccgaatatggctgagcccagggctttctatgggctcagaatagggagtgtgtgctaattggtttgtgagtatgcaaaaaaggttaaagtgaagacatcaaaggtgggcacaatagtgaagtaaaccaattaggaaaagggagatatacgtaaaataagtgaaggatggggatcaatcagaggaaagcatgccaaatgggaaggtgggtttcaatttggtctgaggatttacccagcactgttttgggcttgaaggtcaggtttcaccagcgacctgcccctatctgcctaggcatttgtctgcctcctgcccctatcatttttttaaagccagtgagagcatcccccggaaaagagactctaggctttaaaggaagtttcttctacttttctctccccattgcatcagggaagcttcatccacacaaatttatctgaacccccagcatccttcctaacttcttgccttgccatgctttcttatcaaactctggggctatgatttggtgatttgctttcagactcttacttcctcacttggcttttccaatttggcaaattttctgctattgactcagtatcacatctcagcaggaccctgactccagtttcagtctatgcctaggttttggccaccagcttaaaaacattctcattcctaacttcaacctgcccttggcttctctctcactatcttggtgctgacagctcagatggtcaccaccatatcatgagggtcaacatcaaacatcaatgacacagatgcattttaaggtatattttttaaaaggcagtttaaattttacgagtaatgcatgagtttcttctacttgtaaagttcaaatattgcagatgacgctaaatcccttaagccaccattccctgaccatcccacaataagaagtcagcacaaacacccaacagattgacaaaaaaaaattaaagtttgaaatacaaagtgttcatgaaaccatgggcctgcagtttctctcacagactcctaataaaactggggggcattttgacaatgtcggttaaaatttagaatttacaaaatctatgtcccagcaaaactactacatgatatttaccctacagttatactcaaagatgaggacaaaaaagcagactcataaatgcacagtgtgcagtggttgtgatagtaaaaataaacaacttttatataattttaaaatgtggcaggattcatggcatttgcaacatgtaactacagatgtataaaccatgtcactgtagattcttatttgcaaggttcttccttttcttcattcttttcaccaaatcatttatattcaatagtaaggtaaacacattaagtgagctaggagggagttttagaggagttctttcctcttccctttgccccaaatagcaatgagcagataggaaatagaaaataagattctaagagagtatgtttttttagaaaaggaataggagatattagtagatctgaaatcaaggagacaattcttggtgaagctgcagtgagacaatataagtcagaatgcccagaaccactttggtacatcacagataatctgtaaaaatttaccacatctggatcaattctgttttttctaccatccatattgtattcttgctctgaatatacaaactccatgcaaatattatcttcttaattagctttaagacttacctttattgctagctttggctataaaggacaggacttaaatgagatccacatccatataaaagctgtgtgaccacatgctatctaattttgggggagttccctggtgatatggtttggctctgtgtccccacccaaatctcatctcgaattgtaatccccatgtgttgagggagggaagtgattggattatgcgggtgtttcccccctgctgctctcatgatggtgagtgagtctcatgagatctggttgtttgataagtgtctggcttttcctccttcactctctctcacctgccaccaggtcatatgtgcctcttacccttttgccatgattgccttctcaggtagtattttttatagcagtgtggaaatggactaatataactggtgaacctttgattccaaattttctacatgttaatctcttggtaacaccctcacagacacacccaggaacactactttgcattcctcaatccaatcaagttgatactcagtattaaccatcacatggccattggcttttgtggcaattttctataacgtggaatcatgtcatttatgtgaatctaagttacagctaatctgagaatctaatagccacataccatctgccaccccagtacttaccaaaatctcattatttcttttgtacacacatgtacacatacacatacacatacacacacacacacacacacacccctacataaaggttatggaggcctcacatttaaaagaatgaaaataaatcctgaaagcaagaggaatacttcagaattccctgtttatctcctcttgtatcataaaagactgcatgaaaaccttgaatgctcttcttgaaacaattcaggggattttcaaggctaattctgatgcctcaggatttttgccatgtgtgcttactggcttcagaacccagccctgtgtaaggagaaacccatcatacctgtcctgagaatgtgctcctttgctccctgaatcagttgctcatgagactgtagagccagtgatagccggtctccagcagctaccacagtgcctgatgctcaataagaacttactaaatgaaggaattactgcagtaggaatcaaaatgaatgctttggcttaagagctaacatgcacagatataatagatcaacctaatgcccataggtgagtcaatagctgaataaactaagacatgttcatagtttagaatgctaggtggctatttaaggaaacaggaggcacataataggtctatataataatagacgtggagaaataataactcagaagtacataggtattattactgagtgaaaaaatttcaggacaacattaaatagcatgatgccatgtatataaacaaaaactttttaatctatataatttctacgggtatgcatatccacacacagctgatatctagaattatataattaataaaagttacctttaaggagcaggagagtgggtcaaaggaggtggtagccttatgtgtaatgttttatttgttatatggggaatttatgtcttccttatgcaattaaaataattttttaaagagcgttgagtaggtgatgatcacatgggcctatcttgttcagctttattatcagtaaccctcccatcaataagcaaaggcagagctgccccataaaaagcccctgtctctgtgctcagccttgtaggactgtcaccaagctcttcctcctggtcactcattcttgtcaagccacttgctccattctgacatctctcattccgatcacactggcttatgctagctttcatctctctctctgcccaccctgtgcccactcccaggatgccagaacccagccgttgtatagctcctggatgcccctaatccaaggacactatgattctaacaagatgatgaacaatggtgagatcaaaatgtgagtgattggtgatttgctaaaatctaaaaagcactgaatttactgaccaatttttagatactcaaaggcagaattcagtctgatgaaagcagccaaatctgtgagtttacaatgttcctaaaataaaataattatcatcatcctcatcctaaccatcaatctttgagatattattacagttgattctcatcattcatagtagttatgtttcataaagttgctataaacactgaattaacaaataatggaccattgttcctagaggaaatagaaggctaggctcctaagagcctctagtcacaatatattcatcagccaattaatatataaccctgttatatcatatgtgtttgtttaatacatatgattgattcattatcattaaactcacagccaacactactataactcatgcctgaacaaagcttatctaatgtatgtattttctttataggcacgtcatatccttcttgtctttagaagcactatagagcacttcagggctatgtttggggatattttaatcaaaatcaccaacaaaaagcacaaacatgtgaaaaaatggcactaaatagactggagatgaacactatttacagtgtaagtgctgaaacaagaaggcagaacattgccttgtttaacctcagctgagaatgtgtatttcggccaggcgtggtaactcatgcctataatcccagcactttgggagaccaaggcaggtggatcacttgaggtcaagagttagagaccagcttggccaacatggtgaaaccccgtctctactaaaaatacaaaaaattagccaggcatggtggcatgcacctgtaatcccagctacttggtaggctaagtcaggagaattgcttgaacccaggaggtggaggttgcagtgagccgagatcatgccactgcactctagtctaggcaacagaggaaaactctgtcttaaaaaaaaaaaagaaagagaaagaaaacttagagaatgtacatgtgcatgtcaggcaactcaactttcgttgctttcctaatgtctgtgaataatcgtgaaaatgttgctagtatcgactttgggtttacccacaagttttagcacgtaggcaaattttcgaatactgaatccacaagtaatgagggtgcactgtgtacactcaacacctgaaacattttttactttttttttagttgtatatcaaccttttggagtagacactattattccgaattcacaaaagaaggtaaaagcttgaagagattacatgatttgacaaatatcacagagctgggaaatcatggatctggagtcacacctgggcctgtgtgattctagagccagagccttgaactcctggtttgccacctatctggatgtctatagtctaaatgtaggtaccccggtcttcatattacagtatgaccacataatcaaaatcaagtgaaaccaccatattgaccatcagcagagtgcagactcttttgcatcaaacccatcattcgaccttcaaaactgccaatcttagtggagtgggaacaactctcattgcatgggaccaaacactctaggtcacaaaatttttcctaaatagaagttaaaactcaatcaaatgttatgacttcacctgactccacacctgggatgtccttcataccctgaaggtctctttaagcagagtgacaaaggaatctcattaaatgtgtgcactatggcctgatggcatgttctcatcataagcccataggtgccttctgatgtgttgagactctaagtgttttttagcatgaaggatttttcaaataacagacataatttgaggaggaaggaaagactcagatcacatttgctaagatttttctgaaaggaaaagttaatactggcctcatttatattctcaatccctcctaaacttgtcatttataattttgatccttgttgccaagatcatatgtctcagtctaccttgaatattttctatcctttttcaatattaaccatccgtatatggttcatataaagttaagcaatgattttttacaaataggtatagagaacccactatgtgcaaggtactaggcatgttgttgtgaagagctcatgttaaaaaaaaaaaaaagacagaccccatgattatgctcaagcaaaaaaagatcacatgaaacaggcatgtgttggctggtgacaagttctcaaagagtgatggatgacatgtttatggggaggggggcatttttgttgggggtcatctctttagagtaagtatctgggctcagaagacaagcatgggttccaatcccagctcagtcactcactgggtcttgtgtgatcttatatgaaatacccatcttctctgattgtcagctttcttcttgactagagacaacaaactctatttcagtgcactgttttaagttaaataagctaagcagagaaaaggatattatcagcatcatcacacatgaaaataggttgtattaaaacagggagaggctcccatatataaacaatgatatgttatacccttttaggaataaaacttccaaagtctactgagccatttcctaggtattttcatgcattatgccgcttaatctttacaacagccctgtgaggccatttccgttagcctgcacatgttataaatagggaaaccaagtcacagggaggttaactggcatgttcaaggtcacagattcagtcactgacaaagcaggatttaaaatccatataccttcacttcagagcctttgcttttacccatcacccgtttacatccttccagctctaggaagaagcataagctaaggcaaacaaacaaacaaacaaacaaacaaccctggaagggtgctcaggacagcagctggatgctcaaagacagaaagtggaccagacagaggaggtggtttgaaagctacattgaggaagaataaaaaattaaacgaaggtattcgggtattgtttattggcaaggtagagccactgagggtttacgagtcaggtggtgctataagttctgtgcttcaagaagattaatctggtacaatggatcagagaggagagaaagaaagaccattttgaagttgtctattaaaatagctcaagcatgacatgataagggcttaaacttggctagtagaaaaaaagaaagtatgagtttgaaattgcttaaaaagaacacctctcttccccattttgtcagttcagtctttagattataagtctgtatttttcctgcaacagtaagcaacactcttctttttcctctttcagaatttgttccattttaaatcctatccactgtatttaaactttgttgtgtttagcattaagctgcagtgcggttgtatattatgatgcctgaaaaaatactctcaacaactccagagcagaagtaagttagtgattcggagcagggagcattaaggttaattacctaataatttactacagtgaatgcatctgtagacattttgattttcactaattgtggagctgaacaaagtaaacaacactttgttcatattccagctgtgaggaatatgtcaagggaatctttcctgtgatttataagcccattgctttacccttgagcacaaggccacttgatgggaagttggaaagaccaatggttttgtggactccatggattggtttagtaaagatttcccttaataagactgcaagccgacctgcccttgctgcttcgctgagtgtgccattcagagaaactaggcaggagcaatgctaatgcaatttgatgagtcctggagctctggttgtagacatgcatcatagtctgtgcttgcgggaagtcggggaaaaggggtaggatgggaatgctgggatagtgtcagagttaaagtaaaatcattatgtgcagtcacatccagactcaaaggccagctcctccaattactagcttggtaacctcaagcaagcaagttgaccacttaaagtatacactttttcatctaaccaggaacaacagtactgctttgtggaattatcatgagaactaaacctgatactaatttatacggggcatctgagactttggcccacccaagtgtcactatcacgtccctttattttcctctacaatttgccttttctgctctcagatcaagtgattgggatcagaactaaccctccatcctgtgcgtcaaagatgggcatttaacctgggcttggctaatcaaagcaattcatcccctggccacagtgatcagtttcaggatggatatattacccaagcaaggccaatcaggctaaataaggtccaactcaagttattttctgctaccttctggaaagagaaagatgctcagtttaaaaaactaaaagatgaggatgccagctcagaatagctgtatcaccccaaaaggggaggacttgattaagaaagaaaccaaacagaggaatacagaccaaaaccctgaagagaggactattgggtccttatgatattgtttgagatcctgaatgcagccatgcccaaaggcagagatatcaaaactctttgttttatgagccaattaattacctattatgcttgtgatagtttacgtatgacttctggaacttccagctaagagtcctagtactttaaagcttcagtatagtttgcaatgcttagaagggacttaataaacactcttcttcttattgttgttgttattaaaggccaggtgcagtggctcacgcctataatcccagcactttgggaggctgaggcaggtagatcacctgaggtcagagtttcaaagccatcctggccaacatggcgaaaccccatctctactaaaaatatgaaattagccgggcattgtggtgcatgcctgtaatcccagccacttgggagggtgaggcaggagaatcacttgaacctgggaggcagaggttgcagggagctgaaatcgcaccattgcactccagcctgggcaacaagagcaaaactccgtctcaataaataaatacatacatacatacatactccaatactcatccctattctcaagccatgtttattttccaaatgattgggaaaggagttccatttactagttttttatgtggcaccaaataaagcaaatgttctaggtttagatcatctctttaaaactaacaaaaaaagcctagagatgtttaaagcactagcaattctgagaggaggaggaggagaaaaagaaacaaatgactgtggccttttgatcagatgcctgggaatctggaaggcattctgtcaaggttgtatgcttagccatcactgccacagagttcaatttccatgagtatacagactttgttcattcatcctattctgtacagtatgaagctttgcatatttgccacctcttgcctttccaaagctcatcattggatgcctgcagtaactggagagttatgtgccttttgaccaaggtactattcagagtccacttctcagatgaggaagctgaaggtgtaagagattatgtgacatgatagtctcaagacccttggggaagaaagagcaggaatctgaaaccaaaatccaaggagtttgacttccaagtggtgccttctccataacttagaaggtgatcacaggagcacatatgggggcaacatagtgtagtgagttgttgctggccacctggccacaggcactgcccaacgatatgctccctatttccccttgagacaactatgcagccttccggaccttctggtctccatgtctaaaaccagcgtgatcacagttcctgcctctcaagagactgaagtgaaaccgccaagccaaggggttcaccttgcccactgcctcgacagagccgattgatcaagacaggggaactgcaatagagaaagagtaattcccacagagccggctgtgcaggaggctggagttttgttatcactcaattcagtctccccaagcattcggggagcagggtttttaaggataacttggtagatggggggaagccagtgagccaggagtgctgattggccagggatgaaatcacagggagttgaagctgtcttcatgcactgagtcagttcctgggtgagggccacaagatcagatgagccagtttattgatctgggtgacgtcagctgatccatcaagtgcagggtctgcaaagtatctcaagcactgatcttaggagcagtttagggagggtcagaatcttgtagcctccagctgcatgactcctaaaccataatttctaatcttgtggctaatattggtcctacaaaggcagtctactccccaggcaagaaggaggtctgctttgggaaagggctgttactgtctttgtttaaattatacactgtaaactaagtttctcccaaagttggtgcagcctacgcccaggaatgaacaaggatagcttggaggttagaagcaagctggagtcagttaagttagatctctttcactgtctcagtcataattttgcaaaggcggtttcagaaggattaactggtatgatggattcaaacacatctaacactaaatccaaaacaaagaaagagtcagacgaaagctgaagattgcatcctaagtgaattaacgcaggaaaggaaaaccaagtactacatgctctcacttaacgtgggagctaaacattgagcacagatggacataaacacgggaacaatagacactatggactactagatagggggagggagggagggaggtgggcgtgggttgaaactacctattgggtacaatgcttactacctgggtacaatatacccatgtaacaaacctgcccctatatcccccgtatccagaataaaagttggaaaaaaaaaaaaaagaaagaaagattgaatctgtgggcacaaatcgaactcttctgagataaaatattgattggaaagttctttagggaagcccacatggagtgcaaaagaaacaacaaggacattccaggcagcccgtctgtactagtaaaaactcagaaataatgtaaagactcacccataggagaatggcaaagtgaagcacatctccgcttatagaatgctacttagcaatttaaaaagaacaatgaacgttaactcagtatgccctgatacagcaagacctataagacttattttccagcagaaaaaaaaaagtggcaatgatttgtgtgaaagaatgaaacaatatataaatttccatagaacaggcaagtctctttccaaataatacatgtatatgtacttttatacagtcttgtgaggacacataccaaacccacagtataagtactgaattgagtgtggggtcaaaagagaatccagccatatctgctgttttaatttttaacgataaaattttggtcatgaattacttatgcaattaaaaattaacaataaacactcgaggcagctgaaagtaacctcacactgcttcaagctaaaagtaaactgcttctactacacagtgctaaaataaacaggaataaataggaaaaaagacatattcagccacttcccaaggtataaaacaaaggggtgagaaataagcaaaatgactggaatctttttatgatttaaatttttattttaactggctgtgtcccatatacacagtgcaattatctttcttcaaaatatcatcactcagttgaatgatcctgccacataaaaaacaggtttggcacaatcgttgcatattgttgggaaattatcatcaactttcttttctcttcaaaaaaaaaattcacaatgacactgatgagttttgttgtttttcatctaatacctccacccagtttaaatccatagtctgcataaaatccttgaaatgtgaccttaatggtggaaatatcctatgtgagacagagcattgtctccaaaatacggtttttcgggactcataacatggggacaattgcaccttctctcgggtcatcacacccatcaggctcttagatatctctgccccacgaggtctgccatttaatccctgctgtcaactctacgaggcctccactctcataaacccttctttcagagcctggaagcgcatgaatcagtttgcattcatatatgtggtttcaaacccacatggaaatttcttctatcccctttgctgattttgcccattctcatggcttcagataacatcttttagctacataaatttgtatttttagttcagatctctttttttgagccctagattcacacaaccaactgcccctgcaccatctttactttgatgactcacatgcatcttaagctgttaacatgtccaaaataaaatctttaagattttgctctcccaaatctctctcctccaattttctcgtatcttagtaaatgaaaccagcatcccaaacatactgtcttactacccactccccatatttacaggctctatttgttttacctccaaactttctctcaagtccatctacttttctccatctgaactgtcaccaaccagctgtgaaccaccatcacctctcacctggtctatgggagcaccttcctcaccagcctctgcatttcatgcttgccatcccccactatttttcacaatgctatgctcctgattttcaccctttaagtttttccactacatttagattaaactcccaactcctccctggggtctgcaagccctctgggactagagcctgcataattcccacactttatatgacagccccctcgacaacacattttaattgcacgaagcatccattgtgccctaggaaacaacctctttcctaagacattttctttgccctggaattttgcatttctgtctttttcacccttcaggtcttttctccaataccacctccatgcagtgccttactttgccgcaccctctaatccaggccctgcctattgaaacagccactctattttctttcttttttttttttagacagagttttgctctgtcaccaggctggagtgcagtggcgttatcttggctcactgcaacctctacctcccaggttcaagtgattcccctgcctcagcctcctgagtagctgggagtataggcaggcaccaccacgcccagccaattttttgtgtttttttttaagtagagacaaggtttcaccatgttgaccagggtggtcttgatttctgacctcgtgatctgccagcctcggcctcccaaagtgctgggattacaggcatgagccaccccgcctggctggaacagccactctattttctttagagtgaaaatcacaaactttaattacatgattcatgtgtgctcttgcttgttattcttgtcctccatgacagcaggaatcttctctgtcttgtttatggttgtagacccagcactgaccttaatggctaagatataattgagacagaaaaaattatttgtaggataaatgaattagaaatgtatttattgagttctgtgctatgtactcaacacttcgctaagaagtagggagtattttgtaaaaggcatgggatcaaatgccatcatctttgcccttaaagaagttgtattttatttgaagagaccaaactctgcacagtgagaaaatgaaactaacaacataagccagtacatttgagtactcgatttaagtactaaattatatgtttttggtcacgtcgagttgaccagaggaacttctggtgggataggccagccaaatggtttacttatgaataagaggggtaaagttacagaagttggagaagtaagaaacaatgaattctggaatatccagagaggtcgtcatggagaaggttaaatgtataccaacctaagacaggtcggaattagttaaaagtgcttgaaaacacctagagtgatggtccttaggttcccgaagtaatgttaataaaagggagcccatttacctgccaaatagcaggatattttattatctttccagtgtatcccataacgaggagtgccagaaattccccaggtcaactcagaattaatatgagacacaatcacagagatcttagtttccaaactcccaagtccatgcctgtatgttcttccccttcccaacacaggccctgatgcactgtatctttttgaggctgaagagagggacggaaccttctcctaagaaacaggctgcagctaccatctctgcccttggtccaaagtgctgtctcctcccatcttatccttgccagctctagtcaattttggagcattagcatctttccataagcagtgataaatcgggacattgcaagacagctggtgtcccacaccaaacctcagaaatcttaccagctagaggcaaacagatgttctctgcctttcctaccttgtttaccaagggctgtaactagtcctgggctttgggtatgtttgcttaacagatgcatcctaatgcaaattaactgggaaggaatgggaaaaaataaacaaaaaatgcaaatgtttagccactcaaaattttctgtcttaaaaatactctccaggaacaaatggcaatgagagcgaagttcaaaatgttcctatttcttctgagttcacagctaatgttctttttatactaggccttcatgtgattattaaggacaaagatcaagaaatagaagggaactccaaatggaaaggggaagaaaattgggatggaaagagaaagccctaagtgtggtatactcaaagaacactaagaggcaaggctggctccaaaacatccatgtaggaaaactggaagagtgatgatatttttggaagattgtgcaagagaactgttcttgagctcctgagttcttgagcaaggacactctttggacgagatcttttgcttatttaggattgtggggctgttagaaattatcaagggctaaatttcaccccagctacctcttggcactactgataacagacaagagacagctgtaaccaaactgaaggtacattgcagtaacgtgaagggaggattagagaccccagctagagaaaaagaacaggtacatgcctagaataagacagtaacagctgaaaggaaaggaaagatacaagaaaccctccagggggaattcaataagatgcagtgagtggatacatttaggagatgccagagaagagtgagtcagaaattctccaaggctgcaggcttggcaggctgagcgtgtatgtcagagaagtcaggagtagatacaagtttgggggcataatgatgaatttgtttctccacctgctaaatttgaggtaacagcaagatatacaggtgacaatgcccagtaggttgttgaagatataggagccagtccaaatagagttcctggtatttgttaaaatagcactgactggaaaactcacctaaaacacacaagcattgcagtgctttgctgaaacctctgaagcttatgaattgtctgttctcagttctttgtgaaatgctgagttatagatatataaccccaaggctcatgatatctaagtctttctaaacaaatagctgtgagtgcaaagaatcataaggtctggaaatgtctgggctggaaatactccagttaagcttggactgtggacattcctccctcccccaaaacctttgtgaattttataatatctgagtatcactacataactggctgtagcaacgtagcatctctatactgttgtcaacttcgtatctatttgtaaaacagtactgctttttaccaaaataaatttaatttacaaagtagtaccgtaagtgaaaaaacagtatcacatgaataaaatacaatggtaaaaatacagctaatgaggaaaaagatattaaagctagctgattactagctgttgtacacatttgtcattttttgcatgcttgacttctctgttgttcaatatccagtgtcaacttgattggattgaaggatgcaaagtattgttcctgggtgtgtctgtgagggtgttgccaaaggagattaacattcgagtcagtggactgggaaaggcagacccaccctcaatctgggtgggcaccgtctaatcagctgccagtgcggccagaataaaagcagacagaagaacctggaaagactagactggtttagtcttctggcctccatctttctcccatgctggatgcttcttgccctcgaatactggactccaggttcttcagctttgggactcttggacctttgtccacagactgaaggctgcactgtcagcttccccacttttgaggttttgggacttggattggcttccttgctccttagcttgcaaatggactattatgggatttcaccttgtgatcatgtgtgtcaattctcctaataaactcccctttatatatacatacgtcttattagttctgtccctttagagaaccctaatactgaaacttctgaaaatccttcctttatgaggaagtccaaattacagggcagggtcttgatttttcaaatgtatgctgaagggggatacagatttctgctccccatctaactctaagtgaccctgtattctggctcatagccttgcaaggaaagaaccaaagacaaaaggatgaatttctgagacgcccacactgcagtgtgtggtgcactgccagctgccacccacagtgcccatgcaggcccgtctcatgacatttcttgcttaatttatcagattcctggctttccttggttgttgatgtagtgtccctgcaaaacttagggtcactcagaacctcataatgtgaccttacttagaaatagggcttttgcggatataatcagttcaggatcccaagatgaaatgctgaatttgttgtgggctctaaatccaatccttagaagacaggaggacactcagatgcacagagcagaccatgtgaagagaaacgcagagataggagggatgtacctacaagccaaggaatgcctggagccaccggaagcctgtcaaagtatctgagcctgagatctattttttgttgaaatgaaagtagcaagtgttaaagagctgttaacagcagagcagtgctaaattgagactgtccccatggggcaattagaaagactgaaagaaactggaaggtaaatgaccttgtatgatgtaatgttatttaatggtatgtctgttttttgcctgaagccatctaatgcagcactagtgatatgtcccctatcttggtaaatattggtttagtaaaatgtcccgcctttataaataggagattgggtcttggtaaagcaaaatgaaagcacacaatcccatggataggctagaagagtcaagtccatgactctgttcttccacgtttcctccttttgctccccactccactgttttacccctttatacatctcttcttcagggctttcctaactatgtttctagcttttgtaagctccgtgctttaacatctgccctatgtgcatatgctgacaccactcgttctggacaataaggtgatatgcccaagtcacctcgccttggtctcctacctccctcatcatcaacacctcccctccttgggaggagtcctcctcctggggcatgttttcaaatgcaaacccaccagttcagagttcacactcctgtcatccctcttatcaggatcacaccattcaggccactattcacctcccctaattaccccagagccaggtaccagacagctaaagacagcctccatgcccagggtctgctgaaattattcaaattagccaatcctgagcctgctgaccctgccttccctgttgcttcccatggaaaccacaacaaaggctctacccaccgttttcttctccctctgcctctgatcagccctagtgctcccccacaaggccccccatggcatgacatgccccttgcatgaggactgtaacaaactaccttttttttttaaattttattattattatactttaagttttagggtatatgtgcacaacgtgcaggtttgttacacatgtatacatgtgccatgttggtgtgctgcacccattaactcattatttagcattaggtatatctcctaatgctatccctccccgctgcccccaccccacaacaggccccggtgtgtgatgttccccttcctgtgtccatgtgttctcattgttcaattcccacctatgagtgagaacatgcggtgtttggtttttttgtccttgcgatagtttgctgagaatgatggtttccagcttcatccatgtccctacaaagggcatgaactcatcattttttatggctgcatagtattccatggtgtatatgtgccacattttcttaatccagtctatcattgttggacatttgggttggttccaagtctttgctattgtgaatagtgccacaataaacatacgtgtgcatgtgtctttatagcagtatgatttataatcctttgggtatatacccagtaatgggatggctgggtcaaatggcatttctagttctagatccctgaggaattgccacactgacttccataatgaacaaactaccttttcactgttaatcatctcctgatctgttggccttgatacacctcgattttctatactttaagacaagagtctcaggaagcaactatatcccttcagtcaccataactgataaaattccaataaccttgaacatcactgggatctattatcataaaatttgcttcttggaatattgttccattttcaagggagatgaagattttctggtgaattcttcacacacctgtgttttggtgataaagtaaaaacctgagtaatagggaagcagcatgactctggaggcaggccatggggtttcaattcagccttccccatttattgatgatggcattatgactagtgattaacttctctagccccaactccaccatctgtaaatatcagtactagtagtaccaccctgtcttagtctattcaagatgccataagagaataccacaatctgggtggcttgtaaaccacacaaatttatatcttacagtcatggtggctgataagtccaagattgggacactgacaggtttagtgattgctgagggtccgctttctggttcatagactgtaccttctcatgtagtatcctcacataggggaagagcagggaatctctctgaagtctcttttgtaaaggcattaatcctgttcatgagggcagaacattcatgacattctcaccttccaaagactgcatctcctactactgtcacctggggggttaggatttcaacatcggactttggagggacataaacattcagaccatagcacaccctcatgggattcttttgaggagtataggacttcatgcagatgaagtacacagtataattttttttatttcaataggtttttagggagcaggtggtttttggttacgtgaataagttctttagtggtgatttctgaaattttggtgcacccatcacctgagcagtgtacactgtacccaatgtgtggttccttatccctcaccctccctctaccctttcccccgagtccccaaagtccaatatgtcattctcatgcctttgcatcttcatagcttagctcccacttatgaatgagaacatatgatgtttggttttccattcctgagtcactccacttagaataatagtctccaattccatccaggttgctgcaaatggcattattttgttcctttttatggctgagtagtattccatgggcatttgggctggtttcgtatttgtgcaattgcaaattgtgctgctataaacatgtgtgtccaagtatcttttttgtataatgacttcttttcctctgggtagatacccagtagtgggattgctgggtcatatggttgatgtacttttagatctttaaagaatctccacactgttttccatagtggttatactagtgtaccttcccaccagcagtgtaaaaatgttcccttttcatcaagtccatgccaacatctatttttttttattatggccattcttgcaggagtaaggtggtatcacattatggttttgatttgcacttccctgatcattagtgatattgagcatttttccatatgtttgttggccatttgtatatcttcttttgagaattgtctattcatgtccttagcccactttttgatgggattttttttttttttggctgatttgctttcgttcgttttagattctggatattagtcctttgtcagatgtatagattgcaaaaattttctgccactctgtgccttgtctgtttactctgctgattttttcttttgctgtgcagaagctttttagtttaattaagtcccatctatttgtttttgttgcatttgcttttgggttcttggtcatgaactctttgcctaagccaatgtcttgaagggtttttccaacattatcttctagaatttttgtggttttaggtcttagatttaagtatctgagccatcttcagttgatttttgtataaggtgagagatgaggatccagtttcatttttctacatgtggtttgccagttattccaccaccattcattgaatagggtgtcctttccccactttgtttttgtttgctttgttgaagatcaattggctgtaaatatctggctttatttctggtttctctattctgttccattgatctatgtgcctatttttatagcagtatcatgctgttttgttgactatggtcttgtagtatagtttcaggtcaggtaacgtgatgcctccagatttgttctttttgcttagtcttcctttggctatgtgtcctcttttctggttctataggaattttaggattgtcttttctagttctgtgaagaattatattggtattttttatgggaattgcattgaatttgtagactgcttttggaataaggtcattttcacaacattgattttacccatccatgagaatgggatgtttttccatgtttgtgtcatgtgtgatttctttcagcagtgttttgtagttgtgtttgcagaggtcgttcctctccttggttaagtatattcctaagttgtggggttttttcttgcagctattgtaaaatgagttcctgatttgattatcagcttggttgctgttggtgtacagcagagctgccgatttgtatacattaattctgtatcctgaaactttgctgaattcatttaccagttctaggagctttttggattagtctttagggttttctagatatgcaaacatatcatcagctaacattgacagtttgacttcctctttcctgatttggatgccctttatttctttctcttgtctgactgctctggctaggtcttccagtactatgttgaatagaagtggtgaaagtgggcatccttgtcttgtttcagttctcagagggaatactttcaacttttccctattcagtataatgttggctgtgggtttgtcattgaggacttttattaccttaaggtatatcctttctatgctgattttgctgagggttttaatcataaagggatgctggatttggtcaaaggctttttctgtgactattgagattttcatgtgatttttgtttttaattctgtttatgtggtgtatcacatttattgacttatgtatgttaaaccatccctgaggacacagtatcattctggccaaagagtgaggaagggctcaatagattcaaactcataactagataaatagcttcaaataatgaacatcaggctatttgtccccagtccttgccttgctttgaagtgaggactttcctgagagtaaagctatgtctttccaggtaaactctgggaccccaggtaagttaattctgggatcctttgtcttcattcaggagatgttccaaggtgagaagctccctaattaaaactggaccaataataataataaccaataaagccagtaaaccacatgtaagggcctacatgcaggctaactctgtagatttcatctttttttttcttattgagaatgttctgaccccagaattcatgctcttaactaccaaactattgcacttattgctgtacaaacttggggtccactgctctatttcaaactcttcacatctcttgcctgatcattaataatgactttataacaacactggcttccctatttcaaatcctgcaaacatctccttcagcctccacatgaccaccaactaccattataattatgtacacatacagtcatgtgtcatgtaacaatggagatacattctgagaaatgcatcatcaggtgattttgtcattgtgggaacatcatagaatgcacttacacaaacctaaatggtgtggcctactatacacataggctagatggtatgacctatagtcctaggctacaaccctgtacagcatgtgactgtattgaatactggaggcaattataacacaatagtgagcatttgtgaatcttaacatagaaaagatacagtaaaaagatggtattacaatcttacagaaccaccatcatatatgtggtcagtcattgaccaaaatgtcattatgtagcttatgactatacacatgtataaatatacaacatatacacttatagaccttaatatgctatgttatgctataatgtcctatgatatactataatatagtcattgttcttctcaaaaacctttcactatctgccctggcccaaagataacatcccaacttcttggggaggcatatgtattactccttgactcacctgcaggagggtcagcatcctctcccacctctccatatatcaccctgcccactccgccagagaacctgctgtttactatactcagcggtaattccacaatgtcactctttcagcaactccttcttcccccaaatgccttccactcttctcaaaatgccttcacctgttcttcaaatgtctcctttggggagccttgcatgaaacccccaggaagaattaaggacaattttgaacacaactctagatcaggccaacatcttctctgtgctgggtactgtcccagtcctcctacctgtttacctcacttccacccttgcctccttccaagtcaatcccatgggaaccagcattttctgaaactcaataaaattagctagcatttcagccaggtgcagtggctcaagcctgtaatcccagcactttgggaggccaaggtgggtggatcacttgaggttaggagtttgagaccagcctggccaacatggtgaaacctcgcctctactaaaaatacaaaaattagctgggcatgctggcatgtgcctgtaatcccagctactcaggaggctgaggcaggagaactgcttgagcctgggaggcagaggttgcagtgagctgagatggcaccactgcattccagctgggcaacagagagagactctttcttaaatatatatattttatatatatatagatacacacacacacacacacacacacacatatatatatatatatatatatatatatatatatgcatgcatgccagatgcagtggctcacgcctgtaatcccagcactttgagaggccaaggtgggcagatcatctgaggtcaggagttccagaccagcctagccaacatggtgaaactccatctctactaaaaatacaaaattagctggctgtggtggctcatgctggtaatcccagctacttgggaggctgaggcaggagaatcacttgaacctgggaggtggaggttgcagtgagccgagatcacaccactgcactccagcctggatgacagagcgagactccattaaaaaaatatatctatatctatagatatctatagatatatatctagatatagatctatgagtatatatctatagatatctagatatatatttatagatagatatatctatagatatctatatatttctatcgatagagatatctatagatatctatcaatatatctatagatttctagagatatgtatctagatataaatctatagacatagatatagatatatagatatttaactgccaatgtcctaaacactttatactcaacacattttttataaaaaaaaatagatatcggtctagatagtatctatctagatatcggtctagatagtatctatctagatatctgtgtagatgtctagatatctatctagatattatctatctagatatctgtcgctatctagatatctatctagatatctgtcgctatctagatatctatctagatatctgtcgctatctagatatctatctagatagtatctgtcgctatctagatatctatctagatagtatctgtcgctatctagatatctatctagatagtatctgtcgctatctagatatctatctagatagtatctgtcgctatctagatatctatctagatagtatctgtcgctatctagatatctatctagatagtatctgtcgctatctagatatctatctagatagtatctgtcgctatctagatatctatctagatagtatctgtcgctatctagatatctatctagatagtatctgtcgctatctagatatctatctagatagtatctgtcgctatctagatatctatctagatagtatctgtcgctatctagatatctatctagatagtatctgtcgctatctagatatctatctagatagtatctgtcgctatctagatatctatctagatagtatctgtcgctatctagatatctatctagatagtatctgtcgctatctagatatctatctagatagtatctgtcgctatctagatatctagatagtatctgtcgctatctagatatctagatagtatctgtctagatagctatctagatagtatctgtctagatagctatctagatagtatctgtccagatatctgtagctatctagattgtatctgtctagatatctgtagatatctagatatctatatctatctggatatctatagatatttaactgccgggcaatgtcctaaaccctttacactcaacacatttcattttataacaaaatatgaggtagatattattatttccctcaactcacagagaagaaaaaaatgaagcatatggagcccatgggctagtgacagagctggtatataaataaggattgaatttggctgaaaaaccccaaataacaatgactgaaatatgcagtatcggttcacaagtagacagtccagagtgggtaaggtagtttcagctatcacaggccaggctcctgctttctttctgctctatcattccagtgcatggcttacttcactaagtttacctcattgtacaagacagctctggaaactcaagccatcacatctgtatttcaaggaacaggacggaagaaaaaaaaaaaggtaaggcaaaaacattatcccccagaagaggttcttaaaggaatcctccctcacaatgcttccacttatatctcatttattgacagagccatagcagcaaaggaatctgagaaatatagactttagctctactcatatgtagtgccattgtgaatagctaaatttagttcttttagtaagacaaaacagagaacaaatatttagtaggctgtgtgcaatctctgccacagtcagatttaaatacctacggtatgatttcgggttgagagtaggtatgtgccatgtttcacataagtcaagtgaagcaagactcaagctaaaaccttccaatggctctccatgctcctgcagtcaactccaagttttcgacatgggcctaataacccatatgacctgcaatgtcaccctttccaacctcgttttatgccacttattgtttgttcattctgccccaacctcactgttcttatccctgctcctctaacaaaccaagattattccaagtgctggagacttttcatgctcaattcctatacaactcagctcttctagtccttcaagtcattccctcagagaaactttccttaactaatgtaacttccacccacatcctcccagtatcccattgtctctccctttccactaaactctaagctctgagaaggcagaagccatgatctcttgctcaccatgactctccagcaccatagtgccttgcacataataggtgcaaaatttgtgcttgttggatcagtgatcaaagaattaccattataatatatattactcctgtagcaattatcttttgtgcctccctagggaagtgctttctcttattccaatctgcatttcatccatgcttacacttgataagaacttaatacatgattgtttaccgccaaccaagaaccatttactgcatcgaccatttattgagcttcttcaatataccatgtattctacttatttctagcataggcactgagatgtcaaaataactaagttcattttgtgcccttgaatttccaaatctagctcatttctgacccaggaatctgttgaaattttaagagataactctcctaacatgaagggaatctcaagaaggaggaggggacgggcgcggtggctcaggcttgtaatcccagcactttgggaggctgaggcgggcggatcacgaggtcaggagatcttgaccacggtgaaaccccgtctctactaaaaatacaaaaaattagctgggcgtggtggcgggtgcctgtagtcccagctactcgggagaggctgaggaaggagaatggcgtgaacccgggaggcggagcttgcagtgagccgagttcgcgcctctgcactccagcctgggtgacagagcgagactccgtcaagaaaaaaaaagaaagaaagaaagaaggaggaggaggaggaggaagaggagaactcgttgagttttatcttacacttacgcaaaaattatgatatgttagtggctcatgataagacaccacagcccatgtcactggaactgtgaaaatcatggtgaccacacaacagcacagctacattatgttcagtgaaagataactctgtagtgatttaatatccaggttgaaaaagaaaggctattttcccgaaacattttacagaggcattcttcaaaagtgactcattcttagttggaactcttcggcatgtttgggcatcatttatcaagtgtgtttacaacgaaggtttctctccaaactcagggtgtgtgaaaacagcccttcacacaatacaaataattctaaccaccaagacaagtggatagagactctggacacagctatgcgttgaagcagagcgaacatgaagggggctcccaagaaggctgtggagaggatcttgttcactgcatctacttcctcactgctgctggaagttccaccactacagcacagttagttcagctttctattttcattctaattaaaataaaaaatgtgaagcctactattgagacaattcttcacgagcttcttgcatttcttcatgtcttgtgagcagaagcactggctgcttttgttacagatgatcctttcaaagattttgtgtagcaaacagtcttggaggacgtagagatgatagttccttctggagaaaacttcaggtctgttttatcaccaaaataattaagataatgtctcccattggcacaaagcataggcattgcctattataaaagatctgtgttccctaaacttgaaatttctttcttgtaatgcaatccacacccattgcgtggttgcatgtgcaggtatgacctagccctctttgttactctgcaggtattagagctcagagaaccagcacaaatattgatactttggctactaccattgccatgaataataaaccagcctttgtctctgacccagaagtcttgtgtcttcaacagcaaccttaagactatagcaagctaacttgttagcaggcaaataggaaaaatgtttctttccagtccttgatacctgccacaccatcattttccctttatcagctagaagttggcttacaagggcttccccatttagccctttagaacctccttaaacttataagtaagataataagcttgctatgtgaatacatatttcaggacaagtcaccttaagccctctttaaagccaattgtttctcttaaatctctcctatatagaaattcatagagccaccactgtacataactcagctacctgaaactggggtaggttcaagagtactgaagacctaggcatcaacaaagaaggaacagagaaagaaagatgacagagattaatcctaacttcttgccaattttttcaagtcaactctgccaaatattattaattaattcagaattgagaggttataagattcagggtatgaatgcatctttggtaaaagtaaatgaaaactttaaatctttgttcctgatttttgtttatttcagatcaatctaattatcatacttaaatattctactggaatgccagagattagcaaacttgtagtttgttatctgaacaaatctagcccactgcatgctttttaaatacacttttatcagaatagagctgtaccatttgtttatgtgctgtctatcactgctttaatgctacaatggcagaagtaagtagttgcattagagatcagatggcccacagatgaccacactgatttctgtggtatttctcaaagcaccaaagcccactcacacttgaggcttttgtattcgctgtttcttccacatagaatatcatataataaatcacctaacagtttagacaccactaacatgctatttctttagagatacctctcctcactagaccatctaaaagagaaccatccccttccctctttagcccctaacatatccttatttacctttgtatcactgatcagtccccctatttattgtctgtaggctcactagaatgtaggctctgaaagattttgggatggtatattgactgttatgttccccaatgcccagaacaaaacatgaaactttgtagatactcaaatagtcaagtgagtgaatgaatggatattttgcttagagctgcatccctaatacctaaaaaggtgcatggcacaaaataaaagctccttaagtattagggaaggaagaaataaggaaaggaggaagagataaagggaaggaaagaagaaagaaggaagagggagagcaaagaagggaaggagaggaaaccttaccaagtccaggttttagtgaaaaagaatgaaacagcataaagacaaaatgaagtaagaggaagatgacagcaccaggagagaaatccatggcacagagcaggggagaagcaatagacatcaaagaccaatgccataatttgttcaggtttccacatctctaggtaattttagccatcccacctcacacagctgcccttccacaagtcagtgaatgaacaacatccatgcaaggacctccaaagacctaatgccccacgagcttccttaggaacaaaacacaggatcgagagaacaaggagtgacagctctaggcattttacataagtaacaattcgtacccagaaactatcatgcccaaatccagatctgaagtgaaggaaaggcatctggtttcccagcagggaatatcatagcagaacatttaaaagtacggacacaaggggccaggcgcggtagctcatgcttgtaatcctagcatttttggagggcgaggtgggtggatcacgaggtcaggagttcgagaccagcctagccaagatggtgaaaccccatctctactaaaaataaataaataaataataaataaataaataaataaaaattcgtctggcatgtgcctgtaaccccagctactcgggaggctgaggcaggagaattgcttgaacccaagaggcagagtttgcagtgagccaagatcatgccactgcactccatctcaaaaaaacaaaaaaagtatggacacaaggaatgaccgggccctccgcaccagtcatcagagcttgggcaggtctccacctctcagagcctcaattttcttacctataaagtggggataataataattgtacctaccttgttggattggtatgagtgactatttgttaagcacataggagtgtgcctgagacacgggaaccaccaggtaagtgctcaacaactgagggataaaacctcaccagtcacttcttcccttcccactgacaccatatcacaataaggctagtgttaacgatatgcttcctatttgtcaggcatcatcctaagctctccatatgcattattttagttaatcctagcaaagccttggaggtagttattattcccatttgataaattagtaacacagatgaaaagacttggctaaggtcacacagctaacaagtcttagagtcagtatttaaagtcacttgggtctggctgtagatcagtgaatcagtacatcagtgaataaatggatccaaataaagcaagtattggtaaattatgaggaagggtcctgagagggaagatgggtctctactaatgagcccaaaacattcgtggccctcaaacacagttatgccctcttgaaagtattcaccagggcactttagcttaattttctcttcaactcctttattaagacacaataaaacatgtaacctagatattaaagccgtactaaaatgccttcaatcaactgatcctgtgcactttttcccttacaggttcacagacctcagtgcacgacattaagggggaaaaggctaacagaggaaggtccaacccagccaatgttcaccagtaaaaggtgatttattaggagaaaaatagaacagcctgcctccaattgacagcccttgcaaccagatccgcaattaaagctgaactgtgcaatctttgcatttaaaggaaaatcaatggcatcgattgaatcaagtaagaacaaccacatatgaacgcattacagatatgactgctgcagaatactattttgaaataaaacataaaaatcaggtgtcttgtgaccaaacatgataactgggctacccaatggggaagccaaaatgttttaatttaatcaaggaatggggttgggggcaactactttgaatgaggtttttgctggtgattcttgctctgcaaccctctcaactgccagtaatttgctggcaggttttatttaacagtgagaatttgaatggattttgtaccctctttcctggggttgcacacagcagtcaattaaattagtaccaaaaccttaaaagacaccaaggtaatcagtttaggaggatttagaccacatgggtttcagatctggttttgcaaggtaatcctaagtctctagtcagctgggtttgagaattacacctttcttcattgggaggaaatttaatagtaaccataaggctgccagaactgtggaattatctttcaattttagtagcatcagtccaggccagcaatgaattttagttttaatagctttctcagtctcagggtggttgatgctgaataattaaagtggcatctgactccccaacaccagtgtacactaagatatttaaacatgtgagttgccataaattatgcaaaaatacctcaaaaacaaaaccattaatgccaatttgaaaatgttgcataaagattgatccaaataatttggctttttcaagaatagttcagctttggaaaactcatctaagccagacaccaaaagctgcttggaaaatatttattcttaagtcaagcttttcctggtaatcttgtatttaagagagaaccctgggggagccccagaaaagaaattattttccatgtgaggctttgagatggaatttcatgtttatcttatttatatgtaggtgtgggtcttttatgttgcttatgccccaataaaataacctggtgatattttcatcccattatgagagtttctgttaaatctgatgcaaggaaaagagagaagcctcaaaaaaaaagaaaaagaattgaagaaaagcagcagccacttttcatatctctaaatgaaagtgaagtgagatgaaaaccataatgtggcaaataaatcccaggatcctggtgaatttatcacaacagttgaacagctaagctacaaataaaaactaaactaactatggagaaataagacttaaatccaagagctaaagtttagctttgtttttgttgcttttaaaaaaaaatacctaaattcattcacatattcagcaaatatttgggagcacctattaggtgtcaggtactattctaaaggctgaggatacagcagtgaagaaagcagacaaaaatccctgccatcctgaagcttacgctctgcagggaaagattatatgcaagcgacaagtttgttggcatttagataagccacaagactgcagctagcctagatagcatctttgaattatgtaaaggtacccctccggcacctgggtgcatcaattagaaaaaggcgtttctctcttcctgcccctcactaggagtgaaccaagggcagagcatgggctaagcttcaggctccctcagattccctcctctgtagacagcacagccaggacaatcgtatctgacatcacagaagttacaggtggtcagaaaaggcctcatggatccggtctgacatgggtgaggaagcaagtcattgtaatatctgagggaagtgtgttacaggcagaaggaatatgaacccatttatgcctgaggttgcaattttttgaatttttgcaatcagacttggtgattttgcaatcagacaagactctacttgagcagtagaatataaataactcccacatgcttagcattccagtaatggaacactaggcataaatgggatttattaagagcaaaaatcttaaggcaggaaggagcatgtcctgtgttgatggacagcaaaggagcagaaaggctgggttggagggccatcttttcttcatctcttaattttaaataagacacagatactttacttttagtaggtatgatacctaactggatgttgcagacctgctttgaggagagacctagttctttaataatcagatcttgaataagagtctttaaaataactcttgtatagtcatgtttctacgtgacagactggggatcctgatatgaccttgaatattcattcaacaaacacattttgagtatttactatggacaaagccctaactaggcaaagagtgaaaagtatcagcatgagcactgcctttatgaagcttacagtccacattgtgggggaaaacataaacaagcaaaaaaattaaattacaaacattattaaaagctataggaaaaatagcatgtgtggatgacagaaagatgtgggggcatggagggagttacctactttagataggagaggtcatactgatttttgaagtattcaaaggcatccaccttgagaagatggggaaaggctgttccaggtatagggtcttagtctgttttctgttgctataacacactacccaagactggataatttataaagaaaaaagtttgtttagctcacagttctggaggctgggaagtccaaaatcaggcagccacatctggtgagggcctcgtgcttctagatagcatggcagaaaagcagaagggcaagtcagcatatgtgaaagaggtggcaaaagcaagccaaactcacttttgtaacaactcgcactcaagaaaactcactcattcccacaataagggcattaattcattcatgaaggttctaccttcatgacccaatcacctcttaaaggtctcacttcttaatacggttacattggcaattacattttcaacacatcaacttttggggaacacgttcaaatcatatcacataaggaggagcaaaagggcttaacaaggaaaaattgagtctgttaaaggagcaaaagtaagtccagtgtggccagaggaatgcatgaaaaggagagctataggaaggctctgcaggagccagggcctggtgagtctagcagctcatgagagagagtttgcattgctttgctatgtgcagtgggacagtgggaagccacaggagggtactaagcaaaggtgtggggcaatctcatcttctcatgatgctacccttgacccactgtaggacagaggttcccaagctttttccatctccttaggtgtcagtaattttgtcacagagcccataggccaaaagaaatacctaatagttccatttactaagtaactaggtccaaacaaattattaagtttttatgttctaaaaatcttaaccatttgaaaaaaaaatcacataaactgattctttttttaaatagagacaaagtcttacttgttgcccagactggtctggaactcctgagctcaagcaaaactcctgcctcagcttcccaaaggctgagattacaggcatgagccaccacatttggtcataaactgaaatttttaaataataattctattcttgaataaccacaattgattgctaatgggctatatgtgcctattaatttacatggtgccaacatttaaaacatggccccactcctgagagttcaccgcaggagccctgagcaccatagtgcagagtttgggaaccgtgccatagaatctattgtcattacagatacacaggacctcagagaagtcaatgaagtcaattgacttcataaaatatgaagtttttaagatccttctaagggaaagaacctgagcacagttcttcaggttttaacgtagtaaattataaccaaaatttgccttgaatctccctgcctttcaactaatatgttaaaatgtaaattgattcccttaaatgtcccactgacatttaattccagaagaaaatgacagagaatgactataaatagttcaggcaccccatatgctcctgtgcatggactggattggccatttattgatccactgttttgggttctgttagtgtggccccagtttccctgctggtgggaaaatataatagtgtcagtgatcaagattttcagtgccccattttagacttgcttgatctaccttctttttaagctcagaaaaatagtactctgtcatgttaaatcagttacattgattttgactagtgagccttcactggtagtaactgacagtacaaaaatgtccaggcaaatgttatgcaaatctcagtcaagtaccctcttctaaaataaatggataactatataaattgtataagtcatactaagtatgaagttttacatgcaaaatgactcaaaaaacttcaggtggagagaaatcataagaaccactgtctttatggtattaatggccaaacacagactcttcattgcccctgaaaaccggcatctgtttacaatgattttgaaatcccaatgttatggaggcataaatgctggagctgagagttaaactaaggtctctctttctgtctagagccctcattctcaactactctaccaatactccttctcctagttgtttgtgaatatactggttcctgaaaagatagatttggatgaaaacattagactctatggatgagggcagaggcaggcaccagtgctgacttctctttagtgctaggctcttgactatggatttctgtcccatacaactgggtctgacttgaattccctactcggccatgaattcaagaacggaaaacattacagaccctcagtacccaatgaccaagctagtggagctaagctctcctgtcctggtatgatccatgcctttcttacatggcttccagaggattccataacctctattctaggctgaaaaatggcaagtacactggactagaaataaaatctggatcctagtcttggttctggagcttcctagctgggcaactgagacaagaggcttgacctgaccacagcaccctcacctgtaaaaagactgatgatttcttccatggctaccatacagcattgatgaaaggctttaagaaggcatgtcatggggaagtacactgctacactgtagagtctcaagcaagtacaaaatattattggggttgtccttggtgttattcctataagaggcagtatgaaacaagttgtaaagcaccagctgtgttctgccctggattcaaattcttattccactacttcctatctgtctggctttgagaaaggtactgcttgaaattttagcttccttacatgtaaaacagggacaatattacctacttctcacagttacgatgagaattgagatacaatgggattttgctcacagcaagtgctcaataatttgcctagaataatattatcactctatgtctaagcttcctcgtcccactaacacttagtttcctcatttatctgatgggaatcatgaacagcatggaggaatcattttgtgttgggcttaagttctaatctaaattcattaggtgaaagccaaatatgaacatagttatccttgaaaactgctttatgtacctataaatggtgaccatatgtcccaatctgactgacacagtccaactctatgtctttcatccatgcacagttattgaaagtatcctcttactgtcaaaagtgcctcagtttggatgagaaaccatgtggtcacccacctatgaagaacctctcccatcaagtccagtgtagattttccctcccgtgctgcaacaagttgctgcttctttggttgattcccaactaaagtagcagtttacaaatagaaaccatgctgtatggaatgtataaatatttaagtcctaaaatgatgcataaaatgcttgaagatgattaaatgcactgaaagataagcttccattgcatgctcattcgagatacaaatgcagtaattagaatcgctggcagtatcagctgcacaatttaaatttcttttttctctcttccccccacccccacccttctcctctttctcctctcttccccactcaccccatacagtgctcacagttgaataccagaaagttaaccacgcatacaatgagaccacactgtacctgtctcctaagattgtgagattatgcatgaagaagactgtgtatagtttctggtgtgtagtaagcactctgggataatctctatttccatcattattatatattcaaattattttcttggcttaactaggaatcaattgctcatcataattggtacttctctagagatattggtgtaggtaattttttttctaacaggacttctttcaggtaagggcaaagtaaagactgcattcatagttgtggctactctcagaagacttcagattttaatttacaaggatgggtttgtggttatcttgtttttgtttttcattccaggcaaaataaaaaacaccaccaagggcaaagatatggaagaatgagagtctgtgcatttcaggtaagggcatgtgaagcagggagaaggatggctgcagacaggaccaaaaaagagagactggagccactttgaaaataatgtgagatgccaggctatctacttggaattacaactgatgggcacttgggaaacatgtgaggtttttctagtaatggagtgacataattacaatgtttgataaataaagcagcagtagaagcttagaagatggaactaggagataagattagaagaaggaagcctggtgaggtgcctgctgccatcaactgagggaaagatgacgactgcccaaaccatataggaagggagagatgaattcatgcatttctctgtgcaaataatgtttgctggggcttccatccctccaccctcactttgacctactttaccatctattcttgtattggaggaagagatgaccaaatttgatcaaaagtgaatagtggaaaatcctaagcatcttttctcttattatatgtatcaatgtgatagtaatagttaccatgcatggcaaactctatgtgccaagtgctattataagtactttattttttaacttaatctttatgaccctatatatgtactattatcattcctgttttgcagatgagaaaactgaagcatgagagagtaagcagctggccaagattacatagtgagtaaggagagctggattcaactgtagctccagaacctgttctcttaaccacactgtaccaccccttgatgcaaagggtacattctggacagtttattgttgagtgatatgcatgctgtgcatctttaagggagaaaaatgctattctatttttaagacaatattctttttaagagtataagtagtctatataatttatctttagggaattatttctagtgaattgattaaaacatggcttgtattctgcccgagattggtttaattatatcagcacagctgcaaggagcaaagatgagagatggcctatgatgctttgttgacttttttttttttttttttttactttgggaatgatctgtccaggtactctgattttgaagacagctctccctggaaatcctctggacaagagaactcatattttcacaccctataacctttccattgcaaaaggcaaaccttccctcccaatatcagctcttccccacaccctttcttctccatgcccttgaaactagcagctccagaatttcacagtcagcccagccttcgtgctggtttcaatggctgctgctcttcttaaaacctataatattggcacgccacaatggactcaataaacaagaacagtctgaaaggaatagatgagacagggactcaatattttcccctagatggttctaaaataccctccacaccatgtgtgtctttttgttcatagatgtgtgtgtatgtgtgtgcctaaatagccaaatctcacctgtctcagaacatttattttttctattatatcctgcaagttgtaacaccaagatgaagagggagatataaaaggagctgcttttttggagctgatatacttttggccaaagcttatagattcttagtcatgtataaatctcattccaatgtagggctttcatgactataaacacttttctgcctttcttttcattcaaaatctgagtttaactcattgagtttaaccacattttactttaatctgttccctacaaactataagcttcatttattcattcaagaaatatttattgatcccctattatgtactagcctgtataggatgctggggaccattaggtgggcaaaatagaagctaataggagataattgcccttcatgaggcctgtagtcttagtggcagagacaaatataataaaggggcatgcattaattgttaaataattcaatttgggatatgttccactccagtggacttctgattttgcatctccagcatttatttactgttacaaatagcagccagcactttccttttctttttctttcattttgtaaactacctcagccacttataggtggtatggtttggggctcttcccaggctctaagggtgcacaaatgttctagacatcgccaccaacctctgtgattagttccaaaatgagcaggtgaccgagatctatccagcgacaagactatcatgggaactattggtgcagaaatgctctgccaaaggtctccctgaaaactgagccaagataagaatgatgaatggccaagaagaaagcaggctggaaatatgtccatcagtggagtcttcatgatgtgaatccagctgggcctgaagttatctaactttagtcttcttggttacaccactcaatatggtttttttcccttaaatcaatgtgattggatttctttcccttgccatcaaaaacaccttgactaaacacagccactaggggaaagtgcaggatgatgtgagagaatatgacgcaagtcttggttttattcataattgttctaaactctgaagtatgaatagcagtgagcaagctgagaaagaagtagacatgaagttaggaacaatgtctgagcctgttcatggctctttcccccgatgccttccactccagagtatgtgtttaataactgacatggcttttctgtgtccccacccaaatctcactttgaattgtaataatccccacatatcaaaggtggggccaggtggagataatcgaatcatgggggtggtttcccccatactgttgtcgtggtagtgaataagtctcatgtgatctgatggttttataaatgggagttcccctgcacacgcactcttaactgctgccatgtaagacataactttgctcctcatttgccttctgccatgattgtgaggcctccctagccatgtagaacggtgagtcaattaaacctcttttcttcataaattatccagtggatatggtttggctgtgtctccacccaaatctcatcttgaattgtaactctcacgattcccatgtgtcatgggaggaacctggtgggaggtgattgaattatggggtgagtctttcctgcactgttcttgtgatattgaatgcgtatcatgagatctgatggttttaaaaatgggagtttatgtttaaaagctccctgttgcctgcctccatccatgttggatatgacctgctcctccttgccttctgccatgattgtgaggcctccccagccatgtggaactataagtccattaaacttctttttcttcccagtctcgggtatgtctttatcagcagcgtgaaaatggactaatacaccagtcttgggtatgtcttaattagcagcatgagaacagactaatacaatacctgttagtagagtgaagagaagaataatgaaacaccagtttgtttctcaccgccatttggatcggtttatgatagccaagcaagtaatctgcatccaataattctgcatccaacaagtaattctgcttcttctcactgtctggtggattgcagccctgccaggtgaccctatgaacctcagctgagctcactcactcacacatctgggctcagctgaatgagactgaaacagatgagggcatttgggctctgctctacattcctttcttcctctccctggactagcaggccaacccaaatgtaattttcataactgaggtatcagagaataagacaaatcatgtaagcattttttaaaatactttggttgcatgcctacaaacatttcattagccaaagtaaatcacacagattgacccagggcccagggagggcaaaatgtgttccttacttccagaggagtgaaccgcaaagttgctgcaaaaggcatgaatacagggagacaggaagaattggggtcattcatgcaattgaccataccagttcaaccttcttagttctttccaattggctacaagcttggagaagttagatagtctagatataaaaagattagagtttactgtcaggaaaataggtgcctcataaaaacaatcagagaagctagtagataagagattgctcagcaggaatcgcaccataaaaaactagatctaagattgactggacagtccactgtttccagccagtgtttattttgtttttaatgcctaaatcatatgcctaaaatccaaccacaggaaagataaagtgtttgcctccttctgttgttgccaaaaggcagtaagtcaaagtaatcagacagaattctagataacagtccaatcaaaggtgatggaagagaattcaatgaagattatttgcaaagctgtgggcagcgtttccagaaggaacaaaggacagtgaagcccccaggcaccagcaaaggaagtaggactctgccaccttaagatgaagctgttccctacttgttagtagaaccccctaaaaaccctagctataggagaagtgctgcctgatttgagctgtagacagagatgaggagaaagaaaactatgaaaattggtagcctaaatttctcttttttatcctcccatcttttacaggtgcttcttttggttgaacccaaccagaagccagaggttaaggagcttatactcctggggcacagaacaaaagaagggtagagagtgagtctacctgaatggcacatggagaatgtccaggccacttatacatagatttaagtagttaggaacattctctcttggtttatctattcattatctagggtggtcaaaagtgataggcaccaaatgcccctggctctatgcctcccatcatgagtgcatgaaaaggttttactcccttgtcccctggggtggatgggcccatgagattaggtctagccaataagcatggaagtaaaatgaggcactttgggaccaattatttatttgccaggttagatccttcagagctcccccattttcctatgtcatagttactggaagtattctagacaatggctactctagcagatagaggcccctgagtgaagataagaagtgtatcccctacccactctttaagaatatgctgtgtaggataactattatcctatacagtattgctgtgtatcctctacagtatgttcttaaagagtgtgtaggtgatctacttatcttattaagaaataatattaaatgctatatttaatattatttaaatgccatatttatattatttcagccactgagatttttgaggttgttttgttactacagcaaactgagcctatactgacttaatatgaccctctctggaaccccactagcctagttgaacagagaaagaattcttggaaattgacatttgtcatctgtccaaatggtatttaatgggaactcaccatgtgcaaggcactgtgctatgggatacaaagaaaaaatgagcttacccctgtcctccagatgcttcccacttgccaaattcatttcctaaagtaagaacgtacctattatgtatgtggtagggagattctaagatggcccccattattgcagccttctgctgtttacaacattgtgtgatccctatcatagactgtaggcaagacctgtgaattgttttggtttttttttttttcagacagaatctcactctgtcacccaggctggagtgcagtggcacaatctcagctcactgcaacctccaccacccaggttcaagcgattctcctgcctcagcctctcgagtagctgggactacaggcaactgccacgatacccagctaattttttgtatttttagtacagacggggtttcaccatgctggccaggctggtctcgaactcctgacctcatgatcctcctgcctcgggctcccaaagcactgggattacaggtgcgagccaccatgcctggcctacctgtgaattgtttttaaccaatagactatggcaaaggtatgggatgcaatgatcacacaattatataagattgtaattcccactttggaaagagactagctcccttgctggctttgatgaagcatgaggtcatttcaagagaggcccatgtataatgatactaaggctggcctcagttgacatccagcaagaaactgaactctgccaataatcatgtaagcctggaagtgtatcctttctcactcaagctttcagatgaaaatccagtcctggctgataccttgatggtggctttgcagaggacctacctaatctgtgccttcataaactgtgttgtttgaagctgcaaagtctgtggtaatttgttacatggcaagagacaactaatgcaatcaccagggaccatgataagtgattcacatatgtcttcatatcttattaaattctcacaaccaggctgtgaggtaggtactactattatgttaatcattttctagataaggaaggaacctaagacatcagcgatttattttactttctcaagacatcacaggcagtaagtgctaaagtcaaacttcaaacacaggctgagtccagggtctgcactctaaatctgttctgggctgtttccccttactcccttgataatgacattgtgctcctcaaaaaccttcagtggcttcccctttgctgggaacaatggcttccattgttcatatgaggtgtcaatgtattacaaactgtaacagctaacattttcatagctactctgcaccaagtgtgtcatatatttcatttaatccttccaacaaccgtgtgatgtagttagtatttttctcttatttgaaagatgaggacacagaggcacagaagtaagcatatgcccaagggcatccagaaactaagtggaagagttgagaatcaaacccaggcaatctggtctctgaggtcaccttcctaaccactgtataatctactgcctctaaattataactgaattctcaaaatttgggaatgaattttattataatgaaccagatggggtacattcttatttaaaatgctacccttactcacttgcctttcaatatgctccctcaagtggaagagggaggaatggaatatcatcaaatcatgcaaaatgctggttttttccaaacagctggattgtgtatgtgaacaccatccatcacgtttgtcagcagagaagtttatgaaccactgacccagagattaaattctgtatttctcagccttgcattcagggccctctatggctcagccatgaactgtaattcccactttattcctacaattttcctctcatggaatccagattccattcatctaatctgaatttcttacatccatattacctctgttaccgctagtgaacagaggttcactaccttcggtttcttctacctttgcatcatcacatgtccaaatactgcccataattcaagggccatttgaaattctacctcctatgaaaatagtttttaattttctttcctcaagatccttgccatccatactcaagttggaagcaaatcctttcttctctaagttcccctcccatctcatttgtattttcatacagtactattactttctgccttgtgtcatagttaacacacacgattattacaatgacaattataacaacaacaaatttttttcttcctgagtatctgcatcaggcacagtgctaagttattttatgcatcttttcacttaaagacatgcctctgcatgggtaatattattattccccaattgacaggtaaccccaatgcttgggcataaagagggtgatgcttgaagaaaggaaaaacataaactttgtcctgaagttaactgttcaacagaattccagaagcttcagctcttagagcatcactccattcttcgcacacaaaagctacagaaaaagctccttttatttgcagcctgggctgacccttccccaagggaaaaggaagctggctggatgccttaagagtcagattgatcctcctttctctcatatcactacaagttcaagtgcagattccagtcaagagtgaacgtgtgtccttatttttcaatctgacagtgctatttgtgggaattgaacttcaacatccttggggaactttatgctctttcatcctaaactagggcacatctatacttctctgatacaaacctgttatgtattaaatagagagtaataattatatctaccatattgtgagctgaacacctcatatgcaccttgtaatcccttgaaaaaaaaaaagaagaggaagatagagtgacttaactaatgaacagggctaggaactccagagtccatagttgcaaccaaaatattacatgcagaacaccattataaaataaactaaataaaacttccccaaaagtaaccactgttctgtctcttctgtacccttccacagaagaaaagtaataagaacaaaaataagagccaacatttagagtgtatatgatggtgtactaccacgctaaaggctattattcctacttgcaaaattccattaaatctcaccccatgagctaaatactcattatgctcactgtaagggaagaaagtacaactcaaggagctgaaagattttgtcctaggtcagagagagaacaagcgggagaggtgggatttgaacccagtattatctgacacctaaaactatgactttaaccacagtattgaagtgtggggtgggatgtgtgcaggagagcagttgaatcattgtattcaagcccttagcatattatgcatattacattcagttttaaaaaattaaagggccaaggaggatcctacctcccttttaaacaattaataatttttattcaaacagtaaaattataaatatatataagaagaagtaaaattgttagccacactattatcacacagtaaatatttgttaaaaaatcctttaagggtctagagagttaagaatcttagagaaagacacactagaatatatatacacatatatatacatacatacatatatacacatatatacatatataaatatatacatatatacatatatacacatacatacacgtatatatacacgtatatatgcacatacatacacgtatatatacacgtatatatgcacatacatacacgtatatatacacgtatatatgcacatacatacacgtatatatacacgtatatatgcacatacatacacgtatatatacacgtatatatgcacatacatacacgtatatatacacgtatatatgcacatacatacacgtatatatacacgtatatatgcacatacatacacgtatatatacacgtatatatgcacatacatacacgtatatatacacgtatatatgcacatacatacacgtatatatacacgtatatatgcacatacatacgtgtatatacacgtatatgcacacgtatacgtgtatatacacgtatatgcacacgtatatgtatatatacacgtgtatgcacacgtatatatacacgtgtatgcacacgtatatatacacgtgtatacacgtatatatacacgtgtatacacgtgtatatacacgtatatacacgtgtatatatacacatatacacgtatatatacacgtgtatatatacacatatacacgtatatatacacgtatacatatacacatatacacgtatatacacacgtatatatacacatatacacgtgtatatacacgtgtatatatatatatatatatatggaatggaatttgcttcaaaaggttgcagggggcactgagttagtagggacgtagatgaaacatgatttgccctgaatcaatattgctgaagctgagtgacttatacataggggttcatgatagtctatcaagcatatacatttttgtacatgtttgataattttcatagtaaatagtttcctaaacataacataaagagacctacagaaatcaagtaattctctttcaacctctgatcagttctctatctcccctcccccaaaacaaccactgttaagtttctggcgcattgttccagaaatttcccatttgtatacaaatgtatgtatccatttaaaactggaaacatacatagctcttccctttgcttttctcacatatccatttaccccagatgccttccttggccactgtatgtgcagcagccttcctctcctctccatccctctgactatgacatcaccttgtttatttccttcttcacacttaacacaatctatacttgctggcacaataatttactgaggttttcaaattgaagtaaaattcatgtaacataaaattaaccactttacagtgtgcaattcaatagtgattaatatattcacaatgctgtgaaaccatcatgtttatctactttcaaaacgtttgcatcaccccaaaaggaaacctcatactcatgaagtagtctcttctcctcttcttcccccagcccccgacaaccactaacctgctctctgtgtgaatttacctcttctagatatttcatgtgaatggaatcatacactgcgtggctctttgtgtctgtcttctttcacttagcataatgttttcaaagttccatgttgtagcacatcgtatggatgtaccgtattctgtttatccattcatcagttggagttgggttgtttccaccttttggctactgtgaataatgctgctatgtacattcacatataccttttgtatgaatacttgttttcaattatttcaggtgtatacatagaggtggaattgctgggtcatgtgggagttctgcacttacctttttgaaaaaccaccaaactgttgcacccttgactgctccattttacattcccatgagcaatgtacaagggttccaatccctccacatccttaccaacacgttatcttttctatttggtggtttgtttttttcaagtctacctatttttgatggccgagtgcagtggcttatgcctgtaatcccagccactttgggaggctgaggctggtggatcacttgaggtcaagagtgcaagaccagtctggccaatgtagtgaaaccctgtctctactaaaaatataaaaattagccaggcatggtagcaggtgcctgtaatcccagctactcaggaggctgaggcaggagaatcacttgaacccaggagacagaggttgcagtgaactgagatcacaccatggtactccagcctgggtgacagagctagactctgtctcaaaaaaaaataatgaaataaagtctacttatttttgatctggctcttccactagattacgcatttccatgtgcttcaattaccactgcagcctcagccactagcatgaaggcttacgcatagcaggcatgcaaacatgtttcaatgggatgaaatagtcaagtaaacaaaccagcatgtaataacaaacacatctaccgtatttattccaaaagctgcaggatgagttccattgtatagactcatgatcatttcttccagtgtgaacttgaccacacctcggtccaaaagcttccactttatgcagaataggagccaaagttcttacaacagcctacaaggtgctacaaggtgtctgttccctcttaaccccctacagtggttcttggatgtatctcctacttttcttcccctgctttctccactctagctgcactgttcttcaatctttccaagaacgcctctacctcagcaccttttcactaacctttccctctgttttaggagttcttccaccaagtattcaagtggttctccttcaagtctgccctccctgccctcctttatttctcagccaccatcagcaaggggcaacctggtctctgactcatgaagcttggaagagcaagtgtctacactgtaaccctgtagaggaagtggcaggcctaccctccttcaagtctttgtttataccttatcttcccagagagactttgatcatgctcattaaagctaccccaacacccacgtccacccacccatacccgcacacatctctagtactacacatagtaggactagtaggactatgtgcaggactagggatatagagatgatcaaaatagacaaaaatccctgccgtcatgaagtttctatttagaaggtttctaccatctattttagatggtatttagaactttctaccccatgaatagtaggttctcaatatgtatccattgcatgaacgaaggaacagatgaactatttcctttctgacagtgctccaagagttcctgaagacagacattctctcttctccactggcctgggcatcaaacttgtggacaatctgctttatgacttccaggccaggctattccttaaacggaagcccagcaaagacttgtcctccctctctccctccctccctctggagtaccgatattaactttggaactttgatgccctctggtttgtcctgcacaagatgcagccttaacacagtcagtgagggtgttttcaaaatgttcctcctgattacaggcaggttattgatgggcctgaaaggaagccaggcttagaaatggttgtggttggagcatgctgtacacccacaccatgcacacattttaagcatggagagagtgccatcataaaatgtgtggataatatctttccatagtgaactgagcactcagaaaaccttgataacactaaccatgtgactttcagtgaggggtccttcaggctctgcgatcagaagtgcatggtctattactttccagctgggtggccatacatacatcattaatcttgaagcttcactttccacatctgcgaaatggggacagtaacagcatctacctcagggatgaaatggcattaaaatgagaggatttatgcactgcaccttgctcctaagtgaggctcatgcattgcacacatgttcactgggcatcaagcatattctctgcactgtgccattgattctgttcactgctaaagcacatagagactgtcccaaccctcctggagcttcctcttgtgaaggaagacaaacattaatactacatgtacagtatttgtgtgtcctggagattaaaaactcaaatgttctgaagaaaagcaatcgttttctggcagactgcatagttgaatctagccagagcagtcagggaaggtttcccggaggaggtgacactgagctgggagctgaaggaagagcacaaattttgagtgcagagacaggggaaagcaagggaaagagttcttcctgcaggtatcacagtcaactcatgctgctattgcctaggactttcctggttttagcactgaaagtcacacagtgtgagaagcccctcagtgcctcgggcacacgggggtggttggtcatcggggtcaggggaatagcacaggcaaaggccctgaggcaggaagaagcatgtcccattttagaaactcaaagaaggtacatgggactagaacatagagattggtgtgagaggaggcagaaaagttgtcctcagatggctttgtgtgccatatccaggaacatattcttggtctgaggagcaacaggaagccattgaagagttttaagcagggagatgaggggagcaaaggggggaatgttgtaaagtttaccccacctgctgcatacagaatggactggaagacactggaaggaaaagagcagtttataggctcaaaagatgttagttcttactaatatcatgattgttatttcaaagtggggagaaccattgattataaactgagtattccagtttggatctggggtatttgaggctgacgggcaataactgtgaaaaatctacagaatagggcctccgatttccatcacaagaacttccagagaatgagggaccgaagactgaattatcctctgactcaggtcagcaataatagagttccccattgtgaaggactgaattcagtcaaaaatttaattttttaaataaatagaacagaaaggtcaaaacactgtgagcagaaatggagatttgaaattggaaattgcttagaaatgtcttttacaaactctgttctattaaggacttttccaaactctctcccaagggaatttctcttagatatgctaatgccattccatttctctaaagccctgtgtcaaatactgctattgaaaagaccctaatagaagatacacttggaaatcacctgtgattagcagttttattcaaaatgaaacactcctacagtttcaagtggcagaacccagtaagtattgcctcctggattctgatcactgatggcaataataaggcctcccctgctctctccctgtgctaggactctttccacgcctcacgtgtccctcccaggcaccctactcctggccgagacctattcatcctttaggatgtgggtaaacacaggggccaggcgcggtggctcacgcctgtaatcccagcactttgggagaccgaggtgggtggatcacgaggtcaggagatcgaggatgtgggtaaacatcacttcctacgggaagctgccaccaactccccaggttaggttagagattcctcctaccttacgccaccagaacattgctgtttccccctcagagggcactatccatctctactgttgctgctttaattctccttcttccctcactagactgtagtctgtccagagcaggaagtatgtgttcatttgtatcctttgcatttccagtacacaggacaaagcctgccaacagaaggttgcccgatgagtatttggtacatgttgaatgattgtttattgctactttgtgtttgaagtactgtattaaccgacccgctctatgaacattacctcttttttttttttttttttttttttttttttgaggcagggtctcgctctgtcatccaggctagtgtgcagtggtgctatcacaattcactgcagcctcaacctcctgggctcaagcaatccttccacctaatttttttattttttatttatttattttttttgtagagacgaggtctcattatgttgtacaggctggtctcaaactcctcacaagtgatcctcctgccttggcctcccaaagtgttggaattacaggcatgagccactgcacacagccaacattacttaatttgatcctctcaaactctgtaagtggatataaccagttagtaaactgagaatccaataatccgggactttggtgaatttttcgaggtcatgttgccaataaatggctgggtgtggattcaaatcaagcgtgtgactctaaatcctgttttcaaccatgtcacccacgcgtcactcacaaagcaagtgtataggatagaaatgaataacgtgttttgatttcaagaaaacttcttttttaccttcattaaaataaaacattttagcctctggtgctttccttccccaagaaggaatgaaacctgaaaggaagaccttatcaggctatggtcttttctcaacagtgaactctacctgccctcaagaaagaactgttattagcaatttgaagtccaagttaatgggtaatcgaaacccttcctcatcatccctgtagcacaattttgagaggaaaggaagacatacggtctggaccaggggaggcaagagaagtatttaaggaggtgcttgctttcaggctgagcaagtgcagggtcaggcccagagccaggaccctcttaaaagcactcctgtacctccttgcccaggctgctcccactccccagaaagtgagactgagcagggaccccctttataggggcctggagccctggagctccctgggcatgaaaataaaggaaaagactgagttcttccaaaggaaatgctaggtacctaggtagccccagaagtaaataaataacttgttaaataagaaggtaatagtagcttaaaacaatagcctaagaagagagggttccagagatgtttgctttcccccaccgaaactaaggataacatcttcacatttgtccctgagatgcctttcagaaacttggacccacactgaggacctctgtggaatggatccactggcacatagacctcagataagcaggaaggtcaagactgagcttgacccatcatcctgtgttctaagtatcttcctgaggagcctggggaaagtcacaccttcttggccagttaacatgtttctactcacccctgatttttaagcaaagcttctcttccttaaccaacacaaatcagaaaatctctgaatctacccatgacctataagtccccacttcaagatatcctaccctcttaggctgaaaccagtatgtaacctccatccattgattaatgatattacctgaacttctttcctgaaatttatgcctgcctttaaaaatcctttcctgcaagccactggggaggtcaggatttgaacgggagcgacttggtacctcttgcttggcgcctgcaataaagcccttcctttctcccactgcaaacctccatgtggagatctggtcttaacgcactgggctactagcagattccagttcagtaacaatagggtttgggctctgtgatgtggagggataaatgggaggattctggctgagagaggaggaagaggaagccagaatgacaggcccaagaggagggccaccacccagggaatgctggagaagccaatggagagaagcaatgagagcctgaccatgggaggcagcttcttgccaccactgcccagcctgcacctgtggactgtctgtgttcagctgaaggagtcagagatgttgacaagcatatgtgggacccctgctccagtgcagtgctgggaaaagcatttccctaaaagccacagtggtgcaccaggtggcacctggctgtgatcactgaaagcactctcaccagctgggctttcagccaaggtcaggactttgcaccaccccttcacacatgccccaaggccatgtcccagcaatgccctcaggaccactgtaaaggaagcacagtgaatataaaaggaattgtgtgacatctagaaggatgtgtgggtgctatattgggcataagaaagtcaggtttgaatggtgccctctctaaaacctaaagccatctgcaagtcagagagagaggccctaagagaaaccaaccctgctgacagcgggatcttgaactttcagtctccaaaatgatgagaaatgaatttctgtggggtaagccactccctctgtggtattctgttatgacagccttaggacacatgtgccagccttccttggcagcacgttcagacactgtcagaaggaaacccatggtactatctcagggctccacagtaacctgcaccactttacatatatgagccaccagcccttctcattcccagaagtcagactgtaacaggatgccccaccacacctctgccctgccatccacagagttgagctcagggagtcagagaggttgacaagcgtatgtgggacccttgctccaaggcagtgctgggaaacgcagttccctaaaagctgcagagaataaatgggatctccgaggaatgacctcccctttttcttgacttcttgcatgaccggaccgatgtttcttcacatctagcagatctggcagacacatccctgtggctgacttctctccccagggcaggcctgaggtcttctgcctgctcctcctgttcttgcacccccctcctcatcccagagacccttcagtgactggttcagtactcacgcacaagtagtggctgataagtggtagagaccaggcccatctttttcactgttgcattcccgtgctcagcacagaatttttttttttttttttttttttttttgagatggagtctcactctgtcacccagactggagtgcagtgccatgatctcagctcactgcaacctccagctcccagggtcaagtgattctcctgcctcagcctcccaagtagctgggattacaggcatgcatcgccatgcgtggctaatttttgtacttttagtagagaggggttttcactatgttggccaggctggtctcgaactcctgacctcagatgatctacccacaccccagcctcccaaagtgctgagattacaagcatgagccaccatgcctgacctcagcacagattttaatacatggcaggcacagattaatatatgtgcaacatatatattaacatatatgttaagttagtaaatacttgttcattcaacaaaaatgattgatgcagagagagactaaaaatgacctggagatagtacagagaggtggttagaaatagaatcccaaacctcagcttcctcatcagagaaatgagcttaacaatagtatatacacccctcagggctatgtgaacattaacgataatatacacaaagtgtttagcccgggggctgaaatataataagtccctaaatgtgatttattacatggtcatgactttctttcccagggcaagagttgggtgatttttttttctcccttctccttcatctatacctaaactaggctcagcacaaaagggtgaacattgaaagtgtgggtaaatattcattaaatgtatattgaagttatcaaatcattgagcaagcaaaaacatccacttctgaaacagtctgttgtatttctaggacacacgtgggtactgacattcagcaagccttcacgtaactgctgaatagatgaagagaaatggagaagaaaaggtgaaaactgtagaaaaggagatgaagcgaagttcctagaatttatttcagtcatgtatgtggatctctattggctttgtccctcttttcaggtaataatatccccattttcctcagacagccactctttcccattgtcagtccaggaagtttgggcagggtggactctatctacagctgggagaagagggaattgtgtcaatcagcatgatcccgtcccactggccatgacttgttcaggctgtatccatgagctaagttcacccaactacagtgaatccctacaacttgtgggtgccccttagaagaaaaactgcttctcttgctgaaaatgaaccagaaaatgtgtaaacctggggatagagcctgaaattgtttggggccaccacaagaggggtcctgactgaggctaaagctgtaatatgcaatcagagtgaagaagtggctataatttaagccctggatctagccttacctgaagccataacctcatggactttttagtttcttaaaccaactttttttttattattacaccagttttatttggctttctatcacctgcaattgaaatgatattaatagttcactgctaaattatctttggtgcaaagtagggtacaaaacaaaaaaagtcaaaaccacaaatgatcaattcctaattatgcagaatagccaccatttctgaatacctactacatgacaagctccaggccaggccttggcataccctggcattattccttgaaacagccctgcaaggcccgtatcataaaacttctggctatccaataaatcatatgatcccttttgaaaaaagtaagataaataaaacatccaaattcccaatacccaactccttttcttggtcttttaaaatgaattttgtgtctcggttaccattctttgtgtcagggggaagaaaaatacacatacaagagaaactccacataaatcaatctttattccatttcaaagcctgcaagattttccagatattccaaaggtctccttccctgagtgaaatactacatttatttaataaagcaggtaggatttactatctgggcacgggtaagcactttttacttctcacaagatagatgacagctgctggcaggctttttcttccctcctttttgcttttttttttttccctgctctcttttgctatgactgcacaactttacccatcacaactgaattaccaaactgagccaaagaaagattgtccccatgagagtgccatgtaggtttcaggctttattttcttttaaagacagctttaaagaattagaaataaatgttatcaactgtggttttaaatggtgctgacttactgcttttggtgagctgtaacactgctcctcccaacacacacacacacacacacacacacacacatacacacacacacacacactctgtctctctttctctctctctctctctccccatctctctctctctctctctctctctctctcagctgaactccctggggacaggaggtgggaaacgagctggtggggaaactaagttctacaagcatccccggcctagattcaccagggaaagacaaaagctaagtcagtagatttctgtcccttggcttaaaaggagttaaggagccagcgctttaaatagagtcagcctgtggaggagagaaaacagctgggagaggaagaaaagtggtttgttttcatttgctgccagcgggacagaaggtgagggtttctctctcgacattttcacccataagttgggcagcaagccagcctgctctttggctgaaaaactccaattaaaaatgtatgacttcggtcttctggagaggatgggcaaaaagtcaactctgggctgtacaaacacttgaggcagcagaagtgaattgaggaatctcattccctcccttgccaacccactgtctgggaaataatgcccactgattctgggcagagagtgagaaagctccaaagtcacattccacggcccttaccaatgcatgtggtttcatcttgagcccccaaactgtgatttcagaataggttgctccaacctaaagtgcagaataggttacttttatgcacacatatatacaaacatgcacaagcatgaaaacacatacatgaacacacacatgtgaacacacacagctcgatgtttttcagcagcagtcctcttcttgccattggtcatgactcgtcagagtatctgtaggggtttccttcatctccttaggtctgcttgcactttaggtgactctgggcagtgactgaatcagtcttgttcatctctgtatccccagcactcagtggactgtgatgactattacatttgttgaatgaaagggtagatggatgcacagggggcaaaatattcaattctttattccttttgctctgatgaatgtttaacattattcagaagcttccctctcatcctgaagattccttttccacaaagcattagtgacaagaggagaattttcctagtgattttataaagggaagaggtatttgaaatagatgttcttccccatctccctttgccaccacagagcctctcttcagatgttcttgcctccagcaaggggccatgcttcctaccctctactctgttatactgagaaatttcactctgcacccaaagttgcattttggcttccattaaaacagaagaacctgcagtagcaaggaccttaaagtagtttatggaccactggctaccttttgaatctaattcctcacgccggtggcttatccaaactatttctttcaaacatccagagttttgtccctaagtgaggttctgttagatgaaattggttggtaagttctaagttttaatgttccagctcagcatccctaaagtgtaagagtgtctttgattacctttgttaacctagagtcttgaaactgactaaccctctttttaagaattttttttttttttttattaagacagcgtttctctctcttgctcaggctggagtacagtggtgcaatcatagctcactgtggtctccaactcttgggctcaagaaactgtccctcctcagcctcctaagtagctgggactataggaatgcacaactatacctaattttttttttattttttgtagaggtggggtctatgttgctcaggctggtcttgaactcctagtctcaagcaatcctcccaccttggcctcccaaagtgctgggattacaggtatgagccactgcacctggcctatgaccaactttttatgccagttaccattaactttgaattaatcagaattttcttttgatgttttaccttggatgtagacagttttctaaaatgtctccttttgttttagtttgtccttattaatcaataaatctttacttattaatagcccccagggatctctacctactggtattctcttgtgtaacctcatccttacagtgagggctggaactggtgacttgtttccagtggaaaagtatggcaacaatgaagggctgccacttcagagaccaggttgtaaagactcatttccatcttgcttgacattctgttgctatttcggcatgcacattttttacttcaataatgtttgaattacagatggtttttggttacatagataagttctctagtggagatttctgagattttagtgcacctgtcacctgagcagtgtacactgtacccaatacatagtcttttatccctcaccctccccaaccttcctgagtccccaaagttcattatatcactcatgcctttgtgtcctcataacttagcttccactaataagtgagaacgttatcatatttggttttcccttcctgggttacttcacttagcataatggcctccagctccatccaagttgctgcaaaaggacattatttcaatcctttttatggctgagtagtattccatggtgtttagataccacattttctttatctactcattgatcaatgggctcttagtctggttccacatctttgcaattgtcagcacgcacattttgatgaggccaactgccctgttgaagagatggtaaagaagtgtaggtggcttacagtcagccatctggaaagaactgaggctgtcagtccataaaccctcaaggcaatgaatccttccagtaaacactcaagtgagcatggaggttaattctcacccagtggagccttcagatgagaccatggccttagctgacaccttaattacagccttgtgagagaccttgagcctgaggtacacagctaaactatcctcatattcctggctcagagaaactgtcagatttttttcaaaactgtgttgtttgaagccactaagttttagagtaatttggtatgtggcaataggtaactaattcatcacccccatatctggctcaccagtagcctaactagaaatgcttgacttctactctgttgatggctttatcacttataattaaaagtcaaaaaaaaaagtatctttctccttatctcacttagtcattctgaacaacacacatgtagaaatttaatgccacaaaatgaatcactggtaacttccataaagtttacagtatcttactgaagttctgagaagcccaaaacaaaaaagatcaatgatttctgaattatctgtgaaggctttatgtacacccttatttttccagattttatttaagctgctagtctttcctaaccaagttgctgaggtccttatggaaggccactgcctctcctacaagattatactagtaggtggagatccctttctccaagtagtccgtctgcctgaatcactttcacttcttacaaataaatggaaaccttcatcccccaagaaatttgcacgattaaggttttgaggagccatgtcttatggaaagaacctactttgggaatccatttatcgatcgctatattgatcagctccaaagcagccatacaaagctagcccctcgatatttcagtttctaatcttaggaaaggagttcttcctgaattcttcacgtaacaccatggtggatactaaaatgaaccacccagacctcccaccctcttcagggaagggcttgtttctcagctgcagagaattcatgaacatccgactccagctgtcagctccttcagggtcttcctcttcccaaggccatactcttcctagggcaacctgcatttggtagctgagcaaggtggagtagaaagtataggaggcctggccatttggctaaaatgcaaaacattctgaggggccatatttgctccagagcccaccactggagtaaaagaagctttgttgacttgcatctcagtttggcttttccttctgcccattcttgcttcctctcccttcctttccacatgttgatctctcaaatctttcatatccccaactctgtctcagcatccacttcctgagatccaagttgtgacatcactgttacagaacctctatttaaaatttgatttaggataaaatgtgaaaatgcctagcagtgtttgcttctatttgtttccacctatgcggttctgtctccaattttctggccttactttacctcttcaaggtgatgacatccatcggagcagggactactactcctagcttcttgcaactcaaagtatggtctaagaattaacaacattggtgttagtcagtggattttgttggtgacggtgaatctcagacctcactacagaacaactgagccagaatctgaattttggctgggacacatctgatatggtttgactctgtgtccccacccaaatctcatctcctattgcaaatcccacctgttgagggaggcatctggtgagaggtggttggatcatgggggcattttcccccatgctgttcttgagatagtgagggagctctcaggagttctgatggtttgaaagtgtggtacttcccactttgtactctgtctctttctctgtctgtctgtctctctctcgctctctctctctctctcctgttgccttgtgaagaatatgcctgcttccccttcaccttccaccatgattgtaagttttctgaggcctctccagccatgcagaactgtgagacaattaaatctcttgtttataaattaccgagtcccaggtagtatctttatagcagtgtgagaacagactaacacaacatccaagttaataagcactgttctagtaatcagtagctccccacaactgctagtatcacctaagcatatgagaagggctagacccatccctgttgactgagtgaacatggcttatatgtgggataagaaagcttgaggaaaagaacaaagcctcctggttctacccttattgattagaaaatgtaaatatttgattttggagaaaaggtatgatacacaaagaaaggtgaccagcacggcccaactagtgatcgaggcagtagtcctggagcagtttctcattcaagcacaacttccctgtcccacccaccagcctgggttttcctactatcagacaggccttttcatgttcatctgttgccatggctccttcaaatgttggttgcacaaataagtgaatacatgaaagaaccctgagatgatgagacttaaagctaaagaggttggccaaataagccaggagcataaggtgtgactgtttggcctttgagccaagtcacatgaatgacgattttggcatttatcactcaggcacagcaaggagacagagacagccttcaaagaaggattttaatgaactggcggtacttcatcattttgataatcacagaaattagaggaggaaatgagaggcttggcaggtcatctagtctctcacgtgcctgtactgaacaggtctctagtgtatcttttgtaaggttttatggcactccctagtcgaaatgttctttgtgcctagagataagtgggcgtcagttcacccttgttcatttgctcctctctcctacaaaggtcacagttcaaattctgctcttctcatctgtgaactatttcttgcaggcagaagtcaagtgtaactctaaaataagattccctatttgtttttgtttcaagaaatagtcactgggggcagggcgtggtggctcatgcctgtaatcccagcactttgggaggtggaggcgggcagatcaagagttcaggagatagagaccaacctggctaacacggtgaaaccccatctctactaaaaatacaaaaaattagctgggcgtggtggcgggcacctgtggtcccagctactccggaggttgaggtaggagaatggcctgaacctgggaggcggaggttgcagtgagccgagaccggaccactgcactccagcctgggcgacagagcgagactccgtctcaaaaaaaaaaaaaaaaagaaaaaagaaaaaaaaagaaatagtcattgggattggatagggcatgcagcagcagcaacagaatctcaatctcaatgctggacagatcagatgtttcttgctcacacttcctgcccaacacaagtcagcagggaagactatgtttaccatcactcagatccccagactgatgaagaatattttagtatgtccttctatggtcaccagaagaaagagatgggaacaaggcaaactgcccacgtgtcttcctggaagcggcacaccgtgcttccgttttcattttattggcgtatcgtttagtcataatttatcatatgacctatctgtgttcctgggaggcagagaaccggaagtatttggtgaatagcatgaatgatttccatgagaaaaaaatctactacaaatgccagatgtcaacctcatctcaaaggccacctaataagaacatgactctgtaaaagtggccaaatggctttaacataccgtcccttcaattgtattgactcctatgattattaattttatgtgtcaacttggatgcccagatatctggttaaacattatttctgggtgtgcttgtgagggtgtttctagaagagattagcatttggattggtggtcagagtagagcagatggccctctgccatgtgggtgggcctcatccaatccattcagggcctgaacaaaacaaaaaggtaaaggaaggttgaattcactcactgatcttcctctgccctctgtgctcctgttcaagtttttacactcagactggaatctacatcatcagctctccagctctcagggccttctaactacaccaccagcttcccaggtctccagactgcagatatgagacttttcagcctccataatcatatgtgccaatatcttacaataagtaaatctcttgatatgtttctctggagaatcctgacagatataaccacctattatatcaggatatgcagtgacaagaaaaacaaggccacttgatggtgaaggttatatttaaaagggggagatagacaaaagaaagccaagtcaatagataaataagccagataatagaagctttatgaggttttatgagacttaaagctaaagaggttggtcaaataagccagcagcatgagttgtgaccatttggcctctgaaccaagtcacacgaacaatgatttaggcatttatcactcagacacagcaaggagactgagacaagcaaggtaggggtgtaggggttgtgagcatgggtgtgtgtgatgggtcactgtattgttggtgcccaagcagggtgaggaaggcatccacatggacaagaagcataccttgagatgttgaagcccaagggtggggagaatgttcacatggggggaagcaactccatgccaggtgtagagtccgagtggggtagcaaagacttccacactggtgtggggagttggggggacagcccagcatgagacgtcagattctgagtaaagtaaggaagccatccacacaggggaataggcagtagaagcagcaggagactggttagatccaggaatcatcaataagtaaattaagaaccatgatagccaagtttttcattctcagtgaagtgagatacagctatgcaaagggagaaaatgaaaataaaacctgtgttgtttgactggaattgaaggttatcacaataaattcatactttctgatagatacatcgatgtgttataaatgtttatgttctgcatatgcttgtcttctgagaatgcttagcaacatcaataccagtagcagtaagcacacctagctcccaggtcttggcctctaaataccgatacctactaaaacacaaacaaaaacaaaacaaacaaaaaaacagagccttggagatggctctttctcatgctggggaagaaaaggtacaagctgagcctagaacattgggcagaaaagcaacaaagtgctcaaaaaatgatggaaacatgttttaaaaaacatgaccaaacacaagacaattttagcattcaagtaaataatgacagcaatggattaaaactcaatgaataaactcaaaaaccagaagtccatacaggcacaaaaaaatagatctgtgagagtatttcatgggatagtcacataatcacaaatcttcctcccacaaaatacctcttaattctaaaaggatcaagagttaagtatcgtgaaccagcctggtaggcatcactttaatctaatgatcacagggaacattatcagtaatggagacacatttaagttgtgtgccacctgctaggatgcaagccagcattacttctgttacaaccctggcaaagacaaataacctgaatccaatcatagcaaaacatccaaagcgagggatatagtacaaaataaaaccctggcctgaagctctcaaaaatgtcaaggtcacaagtgtcagtcaaagacagagaaaatgtcctggactgaaggaatctgagaggcatgacaacagaatgcagcccatgatttgacctagagccttttgctataaaggacattattaggacaattagtaaaattggaatcaagtctgagaactagacggtagtaatgcatcaatgtaaatttccttttatttgtggttgcatcatagctctgtagatgaaccttcttgtttgtaagaaatacatactaaagttggagaatgaggggccacaccttcaaatgattcaggaaaaaaatacagcactataagtgaaatttttatcagatttttatgccttcaaaataacaaaagaaataaaagttatactaaaaaagataatatattaatgatgtattaacagaacaagaaaagttacagagctgaaagtatggccacagttttgtttctgtcttgaattattatctaaaattcactatcatgaacaggtattccaattgtgattagaaagtggtgcaaaagaggttaattggcttgtttgttttcagtgaatttttgggttctcccagcatcttgattcttcagccacaggcttgaagagcttcacacagctccacacagccaacaagattaggacagggtaacccatgggaaagaatgtgactctgcacatcttagggtattgggttcgcctaattttgcctgtttcccagaaggcatcttgagaatcccccaagaggaagctctcgcgacacttaacctcacgatgagcaggttgctgcatatattgccagcattaatcactggcagcccagactgactttcctggccatcctcggggcaatttaaggcttgaatgtgttcagcaagaacttctagcaggtcagaagccagaaggttgggtacctctcagggcctccagtctgttcgccagggccgaggactaggaactgttaacaagcctcctcacttgtcccaacactcgtgatcagacaggtgggctggggagaagcatttggctgagcttccaaatgtgcagcaggtgctctctggtgcttacccatcagtaaatccataagcaccaagaggcttttattgacaacactgtggcaagtgcttaatcattcctatgtggaatttgaagcagatttttaaaatgaattttaaatgaaaaagtcaaattcttgtttgggactgaataatggcaatatttgaaaatgcactcgagaacatctctagtgtctacctagctggtctctgaagttatctggagaaaccgcaaactaggacagatttaagggcccagacccccaccctatggacccagcaagtcagcaagcccacgggaatcggcaggaaaagcgagaataacctttctgcttttgacccacacatggcagtactgtttgcaatttttaaagcatacattaatttgttaattcagaaaacataaggaggtaaaagtaaactatcatgaaaattgttccaacagatgtgactctttaggttggaaatttaaagagcaacctcatgctcagactcacctgtttggctcaaacttggtggctgtattaaaaagacaatgagcaaggaaaagccgatcattcccaattataatatttaaaacaatcttcttcacatcagcgtggcgctttatagtttgcaaagccccagcatgtattttgacttaaatagtaattctcaaacagtagtatagaaaccactaatatgagaatcatccatggtgctgggaaaaaaatgcagatttcctgggacccaccctaggcttatagaagcagaaattctggggataggaaaagacattaataacatctttaaggagcaccccagatgattcttaagtacagtggagtttaaaaacaactgaggaacatttaaaaaaattttttttttgtagagatggggttcttactatgttgcccaggctggtttcaaactcctggcctcaagcaatcctccttcctttgcctcccaaagtattgagattacaggcttgggccatcacagtggcctaaaaagcatgctaaccctgttagatagacaaggcagatacccccatccaacagtttacttgccacggttgcttaggagtgaactggaggaaccttcactcctccccactttccaagaacctgcaaagccacaacagcagcatgattcgttgtgaacatcctagaagcaggtcctagaaaatctgcctatccctccctgcagcttcattcaagtgatcgaagaccagcatgagtccaattcttcagaagctgtgctaccccttgggattagaagggaagtcctttcagttgcactgggcactgttttctgaaatgagggctctgcaaggcagcttaacccaccatcacctcacttcagtgagcccagatgctagcagtaagaagagatggacgtgcacaaagcaggaagcacaacagcgagtcccaaggcttggacatgggctgggaagttggaaaatgggtgcccaggcatgtgacatatggccaggactgtccacaccccccacaacggccccatgggctggcaacaagccagtgtgataacagaatactataatatgataaaataaacgtgctccttctccccttttcctccccaatctttgaagcaggcagcttactttgtcctcagctcctcaagagaaatgtgtggcagaaagcaaatagaagataagacttccagccacctcagccataatctacttaattccataaccaagtgtgcctctcccccactcacaatccctacaatcccagaactgttatccaaatctgtgggggaatggactggaagcaataataactgaggagaaattttctatcagccattctaaatttgggtgtggggtttggggggctttgaggcagaaataaaattgagttatacatgattttttaaatttttccttgcaaacttaaatttatgaattaatacttaacctgctgaacttttaaggaagctgtgtttcttggctcacaaggggtgggttgattcacaaggagaaatattaaatagctctcttcactctgcagcacctggtacccaaggtgtggggaagggggactttctgtggattggattggaccagagacctgagccccaaactggtttaggtgaattttgatgggtacaaaattacctaacacaaacccagtggcctacaggtctgatgccccaacttcccataaataaaggcaatatttagaaatcagacacaatgggcaggactagcaaagcagaactctaccttcacgccacactaccactaattcttgaggaacttgtgcaaattaggaaagggagctccttactaaagatgatttcatccatcagaagatggtcataatatgcttactagaatatgacaatttggtggattcttctagaaaattatatcaaatatacaaagtctctggtgtctatgaaagaaacaacacacccctggaataatgcagtgtacaattgtacatggcagccctgtatcattcttcactgttttaacaaagcttgatgctaaaaggacactggtgaaagcagtgaggaggtcacttacagcaggttgttgtttcaaaacactgagatcactgggctcagtgaacactaataccatgttctgttttctaagtttttcagaacttccacccacaaagtgaagaggcacttataaagaggttggcaatgatgaaaaagcagactcaaacttcaaactttccagaggaaggggcatacagtaggtgcaaaataagcgtgtaattgtttctttagtttaaaaaaaaatgcacccaaatgacaggagaaggttcttgacttattcctaagagtcttggactctcttagaaaatcattgatgactttgtgattcgtgttcaactttaactcatggcattgtgccaagttgtagtaataaaaaataagttcttccttctaacaaccaattcaatcaaagaaaagaaaatcttgccaaacaggacttttattggctcttatggactccttatttctgtctgatcttctcctgagaaagaaaaagggcaaatgaagtcctcgtctcctctgagacgagccccagctgcttctgatgttgctcctaaatcctgaagcctctagaggcttccattctgagtatctctccttgggcagagagtgctagatgtggcctcttttccaagctcagaaacagtttccttgagttacagaaatgtggggcgtttctctccctcgagagaagttaccagactatttcagcagcatttttccttccaatcaggctagccacaaaatggaaaggcagaatctaatacactttctgatgccacccgtggttcataaagtcacgctaatgaagaacagctgaaatcttttacttgtgaaacagcatccttttacctgcagagaactgaccttaacactcagagagaatgaaggaaaaaaaaccacacagaaccagaatcaatttcactcctttccattgaattttcatgtcagatatcagtgaagttttatcattactatttttctgggttttttgtggaatttcttttgtatctttgtacatgacttttctgattaaatgcttcttatgttagtatttactccattttttttttacattggaggaaaaaatcatgagtttcaccgtagtgttaaaaatgctaacactcaaagtaaacgctgttttaaaagaatcactcgtgactgtttatgtaatttcgaatagctaaggcaaaggaatgtagaagaatatagcctcacatgacacagaaaaaggaaggtggatccgtttgtggaaatacagaaaataatcaaagccccccgactccatcctgagagctgaatcattcaaattggccctcattatggattaaacagggtaactgtcttagtcaaaacagtggactacagaatataagaggtttttgtatgactaagggcctaaagatattttctgatctgaagatgcatttcttacattgcttggccaatggtaagcaatcctttttcctgtgtggtgacactgtgaccaggatgatacagccctgttattggattgccaccttcacacacaccacaatctgtttccaagttaaccacgtttagccccatcgggtgcacatccctcaccatattcccaccccaaagtgggttctatatctgcttcttgctttttatttttttcttgagatggagtttcactcttgttgcccaggctggagtgcaatggcaccatctcggctcacggcaacctctgcctcctgggttcaggcgattcacctgcctcagcctcccgagcagctgggattacgggcatgtgccaccatgcccagctaattttgtatttttactagagacagggtttctccatgttggccaggctggtctcaaactcctgaactcaggttatccacctgcctcagtctcccaaagtgctgggattacaggcatgagccaccgcgcccagccgcttcttgctttttcatgttccctctctctggaatgctatgaaagaaaaccataaaatgattccactgggtggacaggtcattttaagccattttttcccacttctcctaaagattttaaaggattgtgaaaagcgtcacccaatctgcattaatttccctacattttcctctacttattgattacatcttgacatcaaagctgaaacatgacaaaaatagaaaaacaccagaaagagagagacatgaaacttgcttcccttactccaaactacgagcataaagcatttattggcaggagtctctcaacttccctgggaatgaccagaccaatgtcctctagggtttcctcaaaattcccagttcttggaaagtcagaaagtcaaaattaatgttctaaaggtaacctcgtcagaaataaaaaccgtctaagttcagtacctatgacaatgtattttcttattgtaaattatcaccaattgtcctaaaaaatattaaaggcctctgcccttggatgaattttaaacatatagactggctgctgagaaatggccagtgtcatcgatccttctaaatatattctcaccctgtctctctctctctcacacacacacacacaacacacgcacacacccttttgtcaactgagcaatgtcttccgaagccaaatgccaagtgtactaagataaaggtattgcaatccctggaggaggggcacttcaattacaaagaaaagcaaaatatgcctgaatctttatttcagaacaaatgctgacaaaatgaggaatgtcactaaggattttctttcttcacaagatggtcactttctgtgagtgacttacctgtgtttccatgtgagggtttcccaaatcttacatgtaggtagcgtcttcctgcagtctgtcctctgcacacactagcaagattccctagtgccttttctcatcccagaacagcaacaacaaaaagtctcatgcttaccagcattaaagcctccagcaaattgcctttggctgggcgagtttaaaataggatagaaaatagaagcacttgtattcctgggtcactgcaaagaaaacaccatccatctccttagatttaggttataagaatcacctggagactgttaagctgcagctgcctgcctgaagcccggcatgggtgattctgaggcaggtggtcatcttcaagttttacttaaagacagaacttcgcgaacttcacaatgcctaagaatcatagggagagcagaggatcttgttaaatgcagattccagttcagtaggtctcagtgagtccacattctacctggggtttctaacaagcccccaggtgatgtggacactaccttccacagattacactttgagtaacaaggtttaaggaacaggcacagaagtccttgctgctgaacgtgtgggacccaggtcagcggcacagcagcacctgagagcccattagaaatgcaggctgtccccttcctgtgtccaaatgttctcattgttcagttcccacctgagtgagaacatgcggtgtttggttttttgtccttgcgatagtttgctgagaatgatggtttccagcttcatccatgtccctacaaaggacatgaactgttgtggggtgggggagcggggagggatagcattaggagatatacctaatgtaaatgacgagttaatgggtgcagcacactaacatggcacatgtatacatatgtaacaaacctgcacgttgtgcacttgtaccctagaacttaaagtataattaaaaaagaaaaaaaaagaaatgcaggctgtcaggttccaccctaggcttactgcattggcatctgcattttatcaagattcccatatgattcttaagcatatttgtttcagaagctgacataggagaacttcaaggtattcacaaagaaattgttttctttcagaaaggtcagaggtggcaaaaaaaaaaaagaggcaccattttgattctcagatatttgaaatccatgttaaaggcaggtctatattagaagagagagtaacctactgagaagccagcttcttaaatctcaacctcctctctaccaaaggaaaccgtttaggacaagagtttgatattgtgagtgccacaactctgaatgtgaacagctattatatgttttcacccttctctgttttcatcacttctcacatcattagatcaaccaatttggggaccttgctatacccaatggacaggtggcttaaacagtaaagatgaattaataaagcctagtgccttccctcagaaggggaggtgaaaccatacatttgaacgtctgttgctccttgtgaagattcaagctttgctttgatatttagggagatccagaaaaaagagatgtcgccacttccgtaaaccctgtaccttgcaaagtgcatgacacattaataaggataatttcattgatgttagctgaagatgttaatatcaagatttaaatagtaacttgctaaaaactagaggctaaaagaaaatatgtatataatcccagcactttgggaggccaacatgggaggatcacttgagcccaggacttcaaggctggcctggacaacatagcaaaaccctgatcttaaaaaaaaaaaaagttagctgtgtgtagtggtgtgcccctgtggtcccagctacttgtgaggctgaggcaggaggatctcttgagcccaggaggtcaaggctgcagtgagccatattcactccagcctaggcaatacagcaagaacctgcctcaaaaaaaaaaaaaaagaagcagaatgaaaacacgtagctatccaactatccagaaaggaaggggaaacaaccttacatcaaaaaaaaaaaaaaaaaaaaaaaagaggaaaaaagtaaaacacaaatttaatcagataatcagggtctaatagaatctgggatcatagaaagcctctggaaagctattagaatcagtaatatcctatgtacaagctctttatttccttcagttttgttttcatgagcttctgtcaggaagaaactgcttgctacagacaattgcttgcatttgttgatcaatagatcaaggaagagtcaaaggaggtagggaccatctaaggaagggatggtgctggcattgacaaatgcaaatagggccaatgcaaatactgtgttcaattagcatttttgtggacccagcgatttctgaaaactatttttgagtcatagaatacgcagggagcatctggctccatttctggaaatacttctgacaccactgcctccttctctttaatgtatcctactcaaacttaattttcttcccttcctcatgccaatcttaatgccttcctgcaggtttatttcctgcttggcccatatgagacctcgaaattttagtaatcgtagtaggcccttagttgagctcctaccgtgtgcccttcacatgtcttatttcatggtaacaaccaactacctgctgtttacaaatgaagtaactaaagctcagagagatgaaggaacccgcccaaggtcacagagctggcaaataaatgttgtaggattccatcttatgtctgtccaaaatccatgcttcctggccaaatccttctgtgccttgtagctattttttttttttttttttttcctgagatggggtttcgctctgtcacccaggctggagggcagtggcgcaatctcggctcactgcaagctccgcctcccgggttcacgccattctcctgcctcagcctcccgaatagctgagactacaggcgcccgccaccacgcctggctaatttttttgtatttttagtagagacggggtttcaccgtgttagccaggatggtctcgaactcctgaccccacgatccgcctgcctcggcctcccaaagtgctgggattataggcgtgagccaccgcgcccggcccttgtagcttttattctctccctcagtcttatcttttccagccactatgttcagtggtgtctctcactttctagaaccagcttagagtgtgttatctcaggatctcattctcacttcatctctccacctggggacactctaaggcaggtttccttccacattttatagccgcggccccactgccttttcaaatggagttccttgaaagtttcaaatggattttgtgtttaaaaatatgtacactaaagctcagaaattagagtcaaggactttgccaattttcttttatgttcagaaaaaaatcaattaaaaaagggcaagccccaaaggatggccacaatcatgtttataaaaacatttctatattgatctattttgatgatcacctaactttctctctctcatcataggtttctattggtaatttcaatacttttgggccattttgccaaaacaatgactgatagtctacagtcatcccttggtacttgtggggaattcgttccagaaccccctgaggtcaccaaaatctgaagatacttaagtcccttatataaaatggcacagtattatgtgcatataatctacataaattatactttaaatcatctctagattacttataatgcctaatacaatgtactgctgtgtaaatagttgttctactatgttggtttttatttgtactatttttactgttatattattgtttttatttgttttttccccaaaatatttttgatattcagctggttgaatctcagatgcagaacctgcagacatggagggccaactgtatttattcaagtaggattcacctgttgcaatgcatacatacaaattctgcacacagggaacccggtggaagtctacgttagagcaggtccatttaaagagaattccactcacattagaaaatgccccttttatttagtctctctgcacaatactttctttttacattataaaatcacacaggaggaaaggtttttgacaggaagccaacagaagacaacttgccaagcaaaacattgaggatccattgccagcatctgcagataatttttttcagagaaagaggagtcttcctggtgatgaatgaatattttgacttggcaattaacacaattatcctggaagacatgcatgcatgtgtctccctataataccttgcctgttgccactaaatacaaaagccccctgccccaccccccaaaaattgttttaatggactaaagaccaggaaattgagccaaatctccaaataaggcaggtgtaataataattcctcctaagaagaggcctgcgatcctctgtttgtcttttagtgttgaaaaaagggcagaacttttcctcaaagtcttcagtatgagaatattggtctttaaactcatcaccactcattcatacattgagcatcctcctgatattttaggggatcttctaaacttaactttttaacaatcagcccttctgaaagaagagtttactaagttcattgattctcttttggcaagctcgcaattcctacatttggacaaattaaacacagtaaagatttcctatatcagctcagaggacactacctgaaaattcagaaagcttttcttagacttcaggaaaaaagaaatgagaggatgaaaggatgaaaggaagggaagaaggaagaaagaaagaaaaaaggagcaaagaaggaagaaagggttaagaagagacaaagtaagaggaaataaataatgtagaatacatatttccaaaacggaaagaaaaaaacaattcaactaacatatattaatctttattctataacagacataaataattttatgaattcatatgacctatacaaaagacaagatattgcactaaatttagatatgggatatttgaatttaatattagctaaacagataaatatatacaatttaaagagttaaggcaaaaccagatgatacttcaaatacaacagaagccttgaaaaataggtataattagaaacaacagcatcccaccaccagttaataaagtggtcatgtctacggaaaaaaaaaaaaccttaggtttttaataaagtggttattatcaatcattttaattaaagttgagcaataaagtataagatttccctcggaggggagctgttttgctgaggctcagggattgagcacttagattttgggtaagcaactttttccttgtcagatttatgatctattcttcttcttagaaaatataacttggaaaatatgactctttcacatatacaattaaaatacaactatgaagcattctttttttttgagagaagtcatgtcgatgatatcgtagtcaaggtaaatttgtgggcaagccattcattaccttattttaagagaaaacataataccagttactgaaaaaaaaaatccaagttttttacaagaaccaaacaaactaattccaaaggaataaaaacaaatataatcaatatattaacacagtatacagttctttggcagtatcacactaaccgttgattgaagtcagaactttagagttttctaatccttagacctggttgccagtcttttaaaactaaacaaataaaattccacatctgtaactaattcagtaatcccaggaaatgaaattcagaataagtcttgcagacagcttttgactgttacatttaagcataggtattatctgcttagagtcccaatccaaatatactgaaacagacacacacaaataatctgtgaaattttgtattggttcagacaggctagaatccttagaatccatatccacccatgagaaaccaataaaagacatcaatccaatgatgaaaaaatgatcttccaataactcaggagtgggtcatccctcacctggatgaacatcatggagaaattgaatcctatagggggaacaccagaaagccagaaaacgtggaatactgccagcctccaaccaaattacctttctccagttttaggtaaaccttatcctctttatctaggtagagcaggacaccattcgtggcagcttcacgagtaacatctttgtcccccgcaaaggcagatattactggttttccatttaacatcaagttaacctagaagaagaaaaataataataattgaaaagttctctttaaagtcaaaacatctactggggagaataaataatgtctaagatgatagacccagtaaaatacctgatgttcaggaaatatattcccttcctttcaaattagccaattgtgggggccatacttcacatgtctgctgaactgatttttttaattttttttttctgattggaatttccttaaattcctacaaaagaataacatctatggagaccaacctagccatgtgaaaactagcttcccttcagcacataaattaagcttactgctttacttaactcttccacccaacaataatcttttggaaatagagcaggcttgtggcttcccggtacattcgtaaaagagaccctctgcccactgacataagagacccagatacaacccaatcctaccaacatccttgcgaatttttgtgcagctgtaacatgcatactactgaaaatcaattgaaataatgaagtttgtgtatatatgtgtctgtgtgtgtttatttctttttctattttccctgataggaaacaagcatcaaaaacaatcatcaggccaggcatagtggctcatgcctgtaattacaacactttgggagaccaaggcaggaggatcacttgaagctaggagttcaagaccagcctgggcaacatagcaggacctcatctctaaaacaaacaaaacaacaaatttaaaaattagcctgattggtcacatgcacctatagtcgtagcttctcaaaaggctgaggcaggaggattgcttgaactcaggggtttgaggctgaagtgagctatggttatgccactgcattccagcctgggtgaaagagtgagaccctatctcagagaaaaaccaaaaaataaaaaataataatcaccactatcactgattttagtgattttagtgattttagatttagattttaaattttagagatttcagtgacagataattagaatcaactcaaaactgtattaactattttctattcttcaattttgattacactgtgtcaagcattgcatacatttctaaatattgggggttgggaaaacttttccatggaagtaagtttgttttctagatttttttaggttaaaagtcatatggaataaattaaatctgaggctgatccatttatccatttactaggacatgtaaaagtattaatagataagcatgtaatctatcattcatattgacataatgtataacataaatactgagcataagataaaaggttatcttagaattccatgcacatgtatttgtgtcatttagtattagcatactggaatattgttggaacaagctccactgttgcttttgaatgtaaggtcaagcccattgtcttagaaagcagaacacaaaatatattaactgtggaactgcagttggtaagaattcactagcatcagagtaactgaggataaacacaagcatacgcatagaacaccgttttttaaaaatgtattttgaatagttcctccttcatagacttattcttactgattagctgtatctcataattttaaaaaatagcaaatgtgttttatttatttagtatgcacttgtaaagctgtactagtcttacaagtttttttcttatgagttcaagtaattcttgtacatgcattaaatgaaagcatgatcttacaaagagatttgtgtcactgaatttttactcaaccatggatttttaaaaaatgtttgattgttattaaggtaataacttcaattctctatttttctatacgctttttgtcacgtcttaatggatgttaaagagaaaaaaattagaaattaagtgttttaaaataaatgataaagatggctgcttatttctattgtggaaacacaactttggataagtacttaaatatataacccactaaagataagcacagttggttgagagtatggatggaagaggtcaaaacacacacctggatagtttggctctggtagactttaatcacgtgaaaactgaaactgtaaattccttttcttggtgctacaaagacagactccaatgtgaaaaaattacccacattcaccaggatctacaaataaaaataataaataacaataagttattatattttcttctgtaactaaaatgaattttcttcctctcactctcttcctctcctcttccttctttccctccttccttcattccttccttcctctttctttcttttcttttttcttttgttcattcattcattcttggcaactagcttaagaaatcatagaaaataaaacatctagttctgtatctttcctcttaactgatttggaaaattgactggaatactggaaggttcttctgtcttttaaatgatataagaataaataaagtaactgctttgtattcatgtctcaatttccagcaaggcccaatggctctggaaacatcgagctaacatttgagaacttataaatattagctttaccttgagagttggataaaaggcacccgctatgtgtttacattcccaccttctacaagcctttgcaatgtccagaggtgacgtttccaagccagccaatcagcatctgtgagctctccgcagcatccctggacaaaccacagaggcatgggtaccccctccaccatgtgacataatccttgacactgaacagttggtgcacaaagtgatctgaatgcctggcccttctctgagccaccaccacccctctcctaagatctgttaccattttttttttcattcctgtgccagctaggccttaattataataatgtggcaatgagtcagcccttgtgggctgccaaagaggagagcatagagaaggctaaactatgaaataggtggctttccctgttcctccccgggctgtccattaacctcctatcaatcacctgctctttatttgaagttcaaggttcaaaagtgaaattagatactgtttcccaagaaagcaacaatgcattttgtattccaaaatattcagcctagttctattggttataaaattaactctaaattttaataagtgacctcttaagctaaatttgcaatgtcacatgggtaagtctctttctatgagaaagagggattgggatggaggatggatgttaaaataaccagggtttgttccatttctttccaagaaatacacctgtaagtggcattcaaaaataataagaggtccctaaaaagatatacttctcatatatcaatggcaatctgctactatctctttcgaacactgcattcttgccaatattaacacacttgcaagcctcttgcataattccctaaaaatgtactattacctctgggcaacataccagaatgtagtgacagtcaagcagatgtatcaggctcaacacctaacttaaaacacatgtacgtgtataatttcattctgagatttcgccttcttccaagtaagcatcagattttttttgtaacctgatgatagatggtctttcaacaagtcaccagctgtgcaataatccccagcagaggctttacaaagaaatttttcaagcacaattaaaataatttgaggtgcttagtggtgacttcctgattcagatacaagtagcataattcattagcaataatgaaaatagctgattagtgttggctacatataaaactggatgttgactctacactgtaattggagcatccaggtacatcgagatttataaccaaatgtgtgttcttgtctctaagatgcaaggctcactgaaaagaagaacaaacccttttcctcttctaattgatggaaaggtcattgaaaggaacaccctgtatagaggatagtgcaatgcccacagtattccaacatttaattaaagcattgaaatacaaactaggggtggtgctagactttatttccatcaagatggaaaatactgcaccaaaaccccaaatggagctacttaattctttaaaaattatgtctatcaaatactaagcccctagagaggcattctctgtctttggccagctggagagtgcattagttaggaaaaattaagcaaggaatacagatgtcacctcgtgctttccctggcacatcctgcaacaccacttaacctgtgccccctgcacattgcagctttgcatacaactgtgaactgtgaatttggaatttaaaaagactctggatactgttggggctgaaattaaaaactctgaggacagttttctcccttaagaccccttgctaaaggtaagctgatatcctggggtttctcatcaagccaaacacggagcaccaggtcgctaaacagcagctacagcttccgtcagctcttcccctactctcatcaacctcaaagtctgtctttccccagctatttgcaattctctgaaaggacatgagcccgggaagggagaactggctcccaagcgctttcctacaggagctcagcgcagttgccaaattccttttcctcccctcctccgcaacttttctctaagtaccggagaagggcttgctgcctactccgaggcagcggcagtgccagcggtgcctggcacacgaacagtggaacctgcaggcgagatctgacccccggctctgcccccgccctccgcggccacctgcccgatctctgaagagtgtggaagcccggggctctcttgggagagaagcttctctacctgggagaaacaaatcaaacatttatcctgttccgcaaaggtacccagggagcagcctcagcggcacccgcagaggagtctgagcaagggcaccaagatctggccaagagataacgacgtccagggaccaggtgcccttcggctcccgccgacctgttgctcgaaacttgccctgagctctcgctgccgggctctgggctcccaagcctctcccccgccgccgcagcagcctcttttaggggcccggaagaaatgggagccggggctggtgagaggggtaggaagagggacggtagaagtttcagacccaggcatatttgggaaggcgagtgctttacatgattccccatttcccaatcggaccagcttagcctgggcaggcagcctcgtgctgaggtgcctggagaccgcccaccccctaggtgctcgcttccccccgggtctgacctgatcgaagtaaatgatgcgcgtcttgttgctcatctcggatggctcgtggttggtgctccgcaccgccgagaaggcgaccttggagttggccgcccggaccgatatccccagcggggaggaagaggagcccttggagtccgtggccgggttcgagtcgcacaccaccagacacttgccctccagcacgatgggctccgtgtcgttctgtgcccagacgggcagccccggcagcgtgaggaccagcagcacggccggcaccgcggacagcgcccggcgcccggagcccatggtgagccgtgtgggcagccgcagccggctggcgctggtgctcgcccgcgtcgcctcctaccccgggatcccggtgctcgggaagatgctagcggctaggtcgacagcgctgcaggagcgacggcggcggcggcgcgcacacttccaccaattctgtggcttgaagtcaaagtctcccctcgagctctctcgctggctctgttacctttgtcctttaaggagctcatgcagcaccctttaccctactctcctccgcccaagaatcagccctgcctggggcccctgcacccactctggttcctagacatctgaaagtcatcaaaccctcacattcacacctcaaggcaaaaaataataataataataaattctcaccccaaactcaagcaccaccagctaaaccacggagcaggaacaaaaagaggggactcaaagagaagccacaagggtggcgggtgcccagcggcgcgggtgccagtcctgtctggcttgcggcagggacgagttacagaggcagaaggtccttcccaggctgagaagaacgcgaggctgtgttcatggccaggacgccagcgactcccactttcgcctggtcaaaaaaatcccccaaacctggtgtcacccagaggtagggagggaggcagcggctagccaggtccctcgcaccgaaagcgcggattcgcaggatcaggtccagggcgccgggcgcagcgttcagggcggctggtccggcggggtcctctcctgcctggccgcccgcccccagtccctgcgcacaactttctcgtccctcgtgcagcccggagagcgcgaagcgggcacacgcgctctatttataggagcgcagcgtccggctgggttggcttatcgcgcaacccgcgggctccgagaaaagggggagaaggcgtctggtgaccccatctgagcagctctctcctgacgtttaacgcaccccaaagcaagcggggcgcacagcactggtgattggcaaggttcgaggcccctcagcccctgaaagcccgtggcgtaaaggatgcgtgcccagagaggagcccacggccctgcgctggccccagctccgcgcccactctctcctgctcgatctgagtccgcagaggaggcggctggtcccctcacccctcccagcgcggaactctgccgccgagtgccctccaagcggagcgcggcgctgccaggccgggtcgcgaaaaaggataagccgccgcggacccgcgctgcgcgctgccccgaacctggggaccggcgggcgtcccgaccgcgcctggccgggagcccgccccacacagccctggggcctggcgagctcagggaagccttggggcggaccagagcccgtgggggcggctgggaggaggtgcctgattccttccttccgctccgggaagatgagcctcagaagccgcaggggcgcgccttccccccacaccgcgaatcctccccaggcatggccaaaaaaaagagtgggagagggagttaactcagcaagaataagtcctccgaaaccgtgccaacaacaataaaaaaataaaaataaaaataaaaataaaagacaatcccactcctaggaatacagcatttttctcccctttggatgcgctttccgcccccgtgccactccactgctatcttggcctctgatttgcaagagttcccttcctcttctgcagctaccacggggaagggaggtttgtctctgtctggacccggctgcgtgaacttggccgagtcactaaccctctctgagaggggggcgcggcgttaactaaggtcctccccacccccatcccgccagctttccaattctgtgatgctgtggggtcatggcgccccttccccaatttcttctacacttccagctgccagagggcagacacgtatggtatctttaaccaaaacagtatcccctccaggcattcggagctcctaaaatggcattggctagttatgaatggaagggatgtttattgagggaggtccttgggatggacggctcccattccttcctgagtgaaggacgccctcatgagcgtggcattcgagccctccacaaaacaaggtgaacctcgtctccagcctttttcccttccttcagaagggccgggcattgagctataagcaccagctccaactgttaaaattgaagacactacgaggaatcccctaaccctcacctccctataatctctcaactaaagtgttaatacttggtgccacaggggccttcagattctgctccagtggggccagtatcaggtgttttgactttatgattttattttacttgtggtggggggtggtctcgctatattgcccaggctagatgcaaaactactgggctcaagcgattctactacctcagcctccccagtagctgagactacaggccggtgtcagttccggctggcaggtgctagtaccatgctatttgttaaaatgttgaaagttacctatctaagctacaaccaaacaaggtgaactagtgccttctgaagatggccaccatttacccagctttgatgccccaccctaagcccagcacaatcttcacctgatccctctctgcactttgtaactctcttccagattttagggatgtctgcctggttaacagcagcaatttcttctcatttgatgcagtcttttgagggtgggtgctgagttgaatttagttccttttatttcctgtaggggtaagcaccctgccttccttgtctgggacagctgttcaataactagaactttggttgttcaatttcaggctgggagaagtttgacaaaaaaaaaaaaaaaaaaaaaaaaaaaactgtgttgaattgttaaatagaaaataagctatcttcctcaccaattccaatatattctctctacctccttttcttctccaggcacttcctgcacgcaagaactgagatttgaagaaacctattctttctctcaccaaaaatattcatttttagtcccaaaatctgcatagtgaccatagtaaagactcaataattgagaaatgactgaatgcttcctaatagaaggtaattatcactcatattatagtataaactgctttaaatgagtctctctcagtaaaatttaaattcaaagcctccttaataattggggataagggtctcggttccttactaaaggatgttctgctcttcaaagtgttctgaagataaggaacacagcattttctgtggacccccgctaagagaagttatcttatattgtgaatcagagggtcctgactctttttcccacaacagttgattaaacacggatagcccctgggttctaggaccatcaatgcatttgataccagaagtccaagatttgtatggtccaacttggccagatgacttggggctgccagattttctctctgcaatcttaatgagacatcaaaatagcttccagtaagcactacatgtggcagagacaaggtttgtagtctcccaaactgacgtggccatgtaggagtcatctgcaagctgaagcagaagaggtattggaataaaccagaggactggccacacttgtagaaagaagccaattctggagcatgagcacttctaagaagtacagggagtgaatagtcaatcgccagttctgaactcttgcttacaagagttccagaaacattttctcctaaccttgggtttcttggtatcctcctatgtctttgaaataaaaacccaattcccttgagctagttttagtaacataccgctccctgtcatccagaatcctcattagaacattgtcccagaaaccataccacaaaaggctatggatctcttgccaaaagactaacaaatccaatctcctgcctgtaggaaatgcttttccaacattttgggaaaggaggcatcacctgttcctcaccccctacttcagccccagcatccccaggagaaaagaaacaagatcaagtttaagtttctctccaaccacagcatagatctgtttttctttttctttttcttgtatttttccagttgaaaatatgctattagaagacctagcagtgacccaaatattttccctttctgagattcccatattgtatttgatgcctaggattttttttttctcctagacctttagagatgacgcagaaatgcatttcagttctctgcagctgggcttaactttaaagtaaattagaatctaaactatccttgcataggaaagcaatacttctgaggtcagtaaattcaatgactgcttgtccagccatcctttagagaaaccaagtttcaagcaagcccaagacagtaaggatctatgagctattttctgactgtgaagaaaatgtttctgagaaggcaaagacagacacacacaaggtattcagctctaagggcctcactgtggttgaatgaaagcagactccatgcatcatgcagcagagacagccgcaggtcagtcgtgcagaagatggaaaatcgagagagagagagcagtgaggcttgcatcatacccagacaaagttccactgagttgcttaattaccctttgctctttataatgatagttatcagcccaagctaatgatcttttttgagggagagtaagtagcttaagaagaaaaagtcttggtgggactgtaaactagttcaactattgtggaagtcagtgtggcaattcctcagggatctagaactagaaataccatttgacccagccatcccattactgggtatatacccaaaggattataaatcatgctgctataaagacacatgcacatgtatgtttattgcagcactattcacaatagcaaagacttggaaccaacccaaatgtccatcaatgatagactggattaagaaaatgtggcacatatacaccatggaatactatgcagccataaaaaaggatgagttcatgtcctttgtagggacatggatgaagctggaaaccatcattctcagcaaactctctcaaggacagaaaaccaaacaccgcatgttctcactcatagctgggaattgaacaatgagaacacatggacacaggaaggggaacatcacacaccagggactgttgtggggtggggggaggttggagggatagcattaggagatatacctgttaaatgacgagttaatgggtgcagcacaccaacatggcacatgtatacatatgtaacaaacctgcgcgttgtgcacatgtaccctaaaacttaaagtatattagaaaaaaagaagaagaagaaaaagtctccatgaacaaccaatatgtgagaacttacatagtctggaaagttccagagtcatgttgagtaaatcttcatagctccttctggagacagccaaatgacagacttgtttcatatgaggatggtattgtgggaaaaaaatagatggatgctgtaaaaaatacttctcaattggttttagaatttgaaaattgtttgggacagtttttctagatagtttattccactcaccccattggcaaataaggtacgtgtctaagacatcagtgagaagtgagacgtcttggtcatggctgcagacaggttttgatgcccctttttggcttcccatgataccctgagcatgttccagtcattatatttatcataatggttttagttgatttattgttgtgttttccctggaccattaactctttgggaggacagaatttagcagagagtaggtatgcataaataaagtttactgaataaagtaacatcattgcttttagttctcataagggaaacaatataacatttaatcactatgatctaagtatgataggaaaagtaaaattatttcagaaatgttgggggcttaaaacgtcaagtccaccttagttactaagaatggaagcccagtgagaaaaggttttgtggaaagggccacatcttgaaatgtgttgagttgaaccttgagactgtagtaaaatcttagaaagaacctaaaaaattctctctctctctctctccctccctccctctccctctctctctccagtctctctctctctccccgtctctctctttctctctctctcccccatctctctctttctctctccccactgtctctctctctctctctctctctctctctctctctctctctctctgctctctctgtgtccctccctctcttcccctctcctgggcacatcttcattattctttggctcactgcaatctaccgttctctgaggcccgcatgagggaaaatggcagctgatacttccagatttcacacataacaaagccatccactcagagatgcccccagatccccgagaagagatgcactgcagccatctgcgttcagatgcccaatcccaaaccaatcaacttggctgtagaaacagaatcatgctgcacacgtgactgatatcccagcaatgaggtgtgtagaaaattggggcggggcatgggaaaaggaaaaatcctagaaagctaatataagcaatatgtggcaaagggaagaagaacaagaggcagactaatttgtgttgtgtgattccaagttaattccctgcaagtgtgtacagatatgtgtgtatttcaatacacagagaatacaagttggcaacaacttgtcaaatttaaaggaattgaatagaaggaaacactattaattgtatttcagatgtttccttattatatatgtgctcacagcaattgtgtattacattgtgattcacgtttgaaaattttttgttttttgaggtgcagtctcgctctgttgcccaggctggagtgcagtggcatgatcttggctcactgcaagctccgcctcccgggttcacgccattctcctgcctcagtctcccaagtagctgggactacaggtgcccaccaccacgcccggctaatttttttgtatttttagtagagacggggtttcaccatgttagccaggatggtctcgatctcttgacctcataatcctcctgcctcggcctcccaaagtgttgggattacaggcgtgagccaccgcgcccagcccacatttaaaatattttttaaaaaagaaagggtttctgagtagatcatccaatagtgatctatcacattcacacttcttctccatagtttactcttaattaaagtttaaaaagtggcattgattgaacagcaatctcccttttttgttatactgatccgactctaaaaatcacttactccaagtttagaaagatgctctgatatagaaagcctcacagtatacatttaagaaaaaaaattccattgcaactagtaacactgatgcatgctgtcaaaatttctcgctacattttattcaacttggctttctttatatagtatgttagcatctaggaaagccatagctcagtgctgggtgtatgacatgtgcctggccactcgtgtttatgttgtgtagataagaagagtctaaatgtggggtccaaaccaatggctacttgtaagaatcagctgggatgcttctttccaacagagactctctggccttactctgagataatggctctgcccatgaactgggaaggtttacttaaccagcacccaggtaaatctgaagcagatggtgtttgactttgtagatgccattggcgtgatgccacaagagtccatttgcattcgggttttttagctctatggttaaaaacagggtgtttagagtcagctctacctcctactagctttatgaccatacagcaagttacaaaccttccttcatccaagaaaattgcaatcatgaaaatcatattcagtccatagcttcttgtgagaactgagtggggaaatttgggcagagcatttagctctgcacctggcacacaggaaaggctcaattaagggtagcaattattatcattaatctgtagactctactaatgactaaaggtgtcaaaccaccacactctaaaccaaggcccattaactattggcaagcaatggcccaacttaacctcacagacattataataggggaaaacgaagtgtacccaagtgtgagagacaatccaggttcagatgcccagaaaataatcacacccgagtttgcagggccagccattgctgatagatcaatgcttatcattatgcagagctaaagctcttgaatgaagcgaagacaccaggcatgtttgtgagctccctacaggggatgaacaacaggtttaattttatttttatttctttcttcccatactctcaatcattatgtctcatctgaaagaagcattgagtggaaatagatggattcttcaaagtggaaattatacagaaagtcaagaacagctggtcagaaacagtcaccacagaaacaggagttcagaaagccaggtagacaccagaaaataacacggcagttgttaaatatccaggagccaacacgggcatcttaggagctagtatgccaactatggagagtcctagacacttttaactttcctgactttagcgcgtgtggtttgtgggaagagagaaaaatagcttcagtccaataggcaactctcctcgccagggcactcagtgaacatctgtcctttgtaagcgtgagatgggaagtgcggatctgctgttgctgctccattcctgctgcctctcagatatgagcagcttgtgccgttgtgtgtgattctagtgtttaaaggaaagtattttcctacaacatgaccactaaaacaagccaaccacttaatctgatgttcagctgaagaaacagcaatctgttttgacactgaaaggaaaactggctgcggtgagctctctgagagctggtgtaccagacaccatggtgagaacttcaaaaggattttcaaggtaagtttgactctaggaaattttttccttgcgtactaattttagaatctaaccctggaatgcaatgcaactacatttgtttgttttgttttgtcttgttttgtttggggtaacctcaattgctgataatttctcccactgaattcccaccactcatgtgagaggtagatcttgttgccaccattttacagataaggaaatacagcatctgaaaagctgctgccaacaaacgggttagacttcatggctggacatctgtcttatatccaaaggtctttccctagacaatatgagaaaagttgaaacaaaaatgcaaggagctcctagaatgctcagaactcattattttgtagttggtgacaccaaattcagaggagaagctgagtgcattccaagaagaattaatgtcaataatgtgcaagtgacaaagttcagaggaagaagacaggcttcatatcacaaaatttttaataaaggctattgaccataagccaaggtgggggaatatatgtttttattacactcacatgtatacatattaaaatatttaatatactaaatataattagattataattagatttgatatattaaatgtaatgagattataatttgatgataagtggttaaattctcctacgctcttctcatggttttatgtgcctttcattcctagtggttaccagagttgagatgttacatttatttgtcttatttgactgaaagaatcttcccagccaataataagctccatgagggcagaggttgcccaggctagtccctgacacatggtgcaggtatattaagtgtttgttgaagtaatgaatacggtgacaccgcatagattctaactttgggtacccttttcgagtgtatttccaattttaactagacggtctcaaaaatttgcttatgttttctctaattctcagtaattatttatgatgcataataacccatccttctttacttggaaatttaatgcacttctggaaaaactgctgtaagtagcccttcctttccctggatgcccattatcacagctgttccttgttttcgcattcctcacactgggttatgagtatcttagctttggccaagctaccagctcagccactttcttatctaccactggggttagcagagtagctcctctttgctaggttgtaggctccataaagcaaaagctgccctgctttgtcctttgctgctaattggggaacggggggattccagaagcaagcctaatagggtgggccatggcttcggaatccactagcttccagctattttagctggccaagagcctcctgaatgacacacaatgcaccaagtaacttgactttcttggccatctgtctgttggctaaataactacctcttggatggaccaaatcatcacttatgcagctggtgtttggcaattgactgagctgaagcccttctgggctggatccaatattcccttactacacacacacaaaatgaattttatagggctttgtatgggtttgtagtcttcataaggccaaatagagaagaaaaacaaaataattgaggaaagagatggactatgttttagagctaatggtttttaagaccagagaaattctgcattgctcccctttattgcttttattttactttattttattctttttcttttcacctttccgtgattcctctgctttatgtcttcttttctacctccttcctatttttctccctacagttcccagttttacactccaactgatatttaattaggacttagtatgtactgggtgagcatagcaaactcaaatgccattggggactatggtgggcatctgctatccttttggtcacccaatgtcagaaactccttcctacgtctgcagattcttcctgctcattagacagagcccatctctcactaaagaagcatcaagtaccagatactcattttccagcttctcttgccataagaggacaagcacatgacccaagctctgcaaattggacacaaccaccccagaggttgaattagaggcctgagaggtggcaggaacctcacagaaaccttgctagggaaggtggcagcaggtttcgtggtctgggacaggcaccagcatcaagcatccagggtgagtgatacgggtgcagcaggctgtgaggtctgtgctacgcagccaaaccatccgtcttggtgaacctggtgctgcagcaggagctggggtgtcattcctgtctgcttcactgcaacccagttctccaatgctctaagatactcttgaaccacagaatacacttaaataaattccctttctactgaaatttgtcagtcgacttttgctgcttgcaagtaagagtccagatggataatgaggccaaacaggagacactagtagaagacaactgtgaaaagatggagcaagcatctctgcctcacctccagcaggcggctgctgttacaccctgaacagtgtgaatccggtaatgccagatacttggcttttcaataggaaaataaattcagattgtttgccaacttttagatgtcagcaactaattcaaaaatttttgtgggctaccttaaacatgatttggggctacatatagctctaggactgccagtttaccaccactttaggacttgattttacttttaaagagcatttcaggagacctgtaacagagagatttctttgtagtaacttttctaggtctcatttaagctctctattttttttctttttttgagacagaatctcactctgtcacccaggttggagagcagtggcatgatctcagctcactacaacctctgtctcccaagttcaagttgtcctccgcctcagcctcccgagtagctgggactacaggcgtgcaccaccatgcccagctgatttttgtatttttagtagagacggggtttcaccatgttggccaggccggtctcaaactcctgacctcaagtgatccaattgccttggcctcccaaagtgctgcaattacaggcataagccactgctcccagcctgagctctacattttacaataactcagatactgtattaatccattttcatactgctatgaagaaatagccaagactgggtaatttataaagaaaaagaggtttaatggactcacagttccacacggctgggaaggcttcacaatcatggtggaaggcaaaagaggagcaaaggcacgtcttacatggtggcaggcaagagagtgtttgcaggggaactgccctttataaaaccatgagatctcattagacttattcactatcatgagaacagcatgggaaagacccacccccacaattcaatgacctcccacaatatgtagggattatgagcactacaattcaagatgtgatttaggtggggacacagccaaaccctatcagataccttaaagctttaatagaaaattgctgggtactaggatggtctgaatgggaaacaccgtaagttaatagcaaactaccacaactgcccataccctcctggtcaaacccacccagccaatcaaaatatttggaattatgtcaaatctccagcctcagatagtgcctctgtctcagggaagcacccaaatcatctggttttcctgcttcaatttatgatgcttgctttctcctaaccacaggccttgcttcatgtcacaacctcacaagttgaagtcttaggatggtgcatcccatcagtgagacctatatctaagtgacagctgcaagacagggtttgaaaagtgtgttcctggcattttcagctgataaaatggaaggtcattcttcctctcaccaagactcaacagatgcataattccccaaacatagaaagggcttctgatgctggtggccaaaaagtaatgtccatcttcactgcatatctttatttgtacttctgtggtacccctcttcagacagggctctgttttttttttttctcaagcctgtttccccttctacctccccattaacataggaagaatctgacaatatctaccaaaaatagactatgatttctgtagaattagattgcaactaaatattgcataatgaaaggctgggcgcagtggctcacgcctgtaatcccagcactttgggaggccaaggtgggcagatcacctgaggtcaggagtttgagaccagcctggccaacatggtgaaaccccacctctactaaaaatacaaaaattagccaggcatgatggcaagagcctgtaatcccagctatttgggaggctgaggcaggagaatcgcttgaacctgggaggtggaggttgccgtgagccgagatcgtgccattgcactccagcctgggtgatagagccagactctgcctcaaaaaaaaaaaattcataatgaaagtacacttagttcaatttaatctttcttttaaggctctatattattctcataccattacatccttcttcttttactagtacatcctgctaccaccagtggttcccaaagtaggttctttattaggacaaccaaggaagcatttaaaaagttataagcccagacctactgaattaaacattctaaggaggtcctgggatctgtattttaaagcttctttggtgtggaaatctttccattttgaagatgtggatggctccttggataaaaattaaggtttcttagtacaatggacatcttgtttctgcatgcaagcacatgtctctccattgaaaagctactcccgtttcactcaagtctcatgactgacagggacaatgttgatcatagtaccctcttcctggtcccaggaatgagcatgtgatcctggcctagccaagtcatattgccccatcttctggtcatggtggttgatctagaggcgagcacatcactcaagcaaaaccagtcaaagttattctagtaggattttatatttagaggcagaagagaacagatcctgcctttgccttcagggcagaaattcaggccagcagatataattttctttgtcaggagtattagagaatgatgccaagataaagaaggatggataagaaacagagagataaaggtgatacttttcttacaatgcctttgcccactcatagacaaagccccctccatatctggactttgccaaaagggagcccatacatcctttttatatttgaagtggttcaagttggatttcttccccttgcaatcaaaacttctagcctaaaggggtgtgttttgttttgaaaagaaaactgaaaaaatacagggacaaatgaattttctgaattttggtaaggtgaatcagcataaaatgggcatttgcctaatcactttttaatattctcagctctaaccaaaagcatggcttgatttagctcacaagaaagcatgaataaagaagccagtctgatttgatgtagtgacacgaaaggactgtgaaggttcaaagtgactttttcaggcaaccaaatggggactttggaccaaatgagctgggaacaaatgcctttcgtgaagacagtttaaatagtaaaatgtaaacaataacaagcccagcaagtacttttgttgcccacatggttgaccaaaaaaattaaatatatgctactagtacctccagttctgtggtccggattgggcaggcacagagaggcagctaagctacaaatactgaaaggaaggcaggatgtgtttcatcacagatgcgtgacgtagatgggacttaaaggttttatcccaaagcccaccaatccagtgttcctaaaatttccttaataacaagctagtgccaaagaagccagattcatgtgcaagtagtgattgtacttggcttgccaaagccccgttaaaatagcctctcaaaaacacaagtccacattgctatggaaacactgtcattccaaacaaaaaaaataacagaagttattctcaagttctgtgcaaactgttggatctgcatctgtgtgagcatgcatgtgtttgtacacatacacacacatacacacactcacacacacgtgctggaaaaagccagcatatgctcatcctcttgactgcagatttgcattagaaggctttttccaaaggaaatgtttggaaatgtcttcataaaaaggatctacagaagtcattttgctttggtcctaggctaaggagatcttgtttgatagatgaaacatggaaaagagaagtgtcataaagctttattgctcttgtagtttcccctcctgattccctttcctgggttttcaatacttgcttcatcgccttgaacatctccttcctctcaagtgcttgaagtttcctttcctttatttccctttggtcagaaagttctgaaattgtaactttcttggcaaccaataaggcatcagtataatatttttgcaacacagtctataattctatattgagaagtcggcagaaacacacaagatctgccttatctagaagtgggagttcttcgctaatgacctcccagaatttcttttagaaatctgacagcttccacttccacagcatcttcaccaccatcactctggtctaatcaccatcgtctcccaccgaggtcctgaagcattttctaaccagtcactctgaatccagggaccctcttcttttccaatctctcactgaggccagaatgatttttttaaattcaaagatgaccatatcattcccctggtgaaaaggctcattagtttcccattcccatcaaacccaaagtccttactgttctatgacgtccgcctcgccttccgccccagcctcagcagcacacagtccagcctcctctttgttttctgctagcctcgctctagccacagaattcaagtgtagcccttcacatttagccttgactgtttccatctcaggcctgggcatgcagattcctccgcctaaaatgattcctccccacccttatccccaccttggctcactcctgtatttcttcagggctgcctgaacaccactccgtcgtcgagtcctcacccagaatgtcctggcatgccctcacctcctagacacactatttttttgttagttatcacaattaccattaaccaatatgttgtcttttctgatagtttataaactccatgagacctatgatcataacagacttgttcagacgtataattcctatacccagcatggtgcctagtacataagaaaaattcaatatgttttgtggaatgaatggatgaactagttaatagatcctagaaattggcaccccagaccgtaaatcacttaaggaagaatctcttggctgttctgcctgttgtgttgtagagtgtagtgcacaagtataaatctgcatgatggtaagtgtcctaagccagatctctgctaaaatgtaaatgtcttttaagtcccaacttaaaaaccgtccaagcctctgccctcaaggtggtggcaggaaaaggtaggcagtgagaataagcaaggaggagaagttatcttgggaaatggactttagaactgagaatgaaagattccaggagccactcaggagttgttgcccaagaaagtctgaagaatcctgctcaggttagaaagcaaacttgaccttaataagggaagctaaggtcatggaagaaggatcacagggcatggcttcaatacaagatcagggattcaatgggagaatagggcaacaaacgtagtccattcataaggggagaagatctttgtgacaggcaggtgagaaatgactccaggaatggagagtattgaaacttgggcatggtattcactcagatcccagaacatgctttggggacttaagtgttagctcagaggagccacattaagctggacttaacttgctgcggttttctttggcccaggctggagtgcagtggtgcgatttcagctcactgcaacctccacctccctggtttaagcgagtctcctgcctcagcctcctgagtagctgggactacaggaacccaccactacgcctggttaatttttgtatttttagtagagacagggtttcaccatgttggccagggtggtctcaaactcctaacctcaggtgatccacccacctcagtctcccaaagtgctgggattacaggcatgagccactgtgcccggcctcgaggtggttttcttgattccttcagccagaattcatctctcctactccactggctgacagcaactgcaagcacctcttctactgcactcagcacattctgccccaggtttgagttatctcttgggtcttcctggctaacccaggagcactgctgaggccctcttcatcacatctgtatctcctccctatcacaagaagctcagtgtttgacacatggaaaattgaatctgaatctctcacatggaattcatcgagtggttgtataagagacttgtaccaataatttataaattgcaacatgctctacaaatgcatgtatcacctgtatatcccaaggctgtatgttatttaatatcaaactcccacatagttagatgagaagaaagtctattctttctctctttcccttggaggtccctctatggtatgttcaggaattctaggaggatttgtccagtttgaagggtccattctgtggacaagcttgttgtggaaaacgcttccacagttggacagtccagatagccaaaagcccagggctttggcaactgttacccaagaaccagtgcttttgatggaatcttgctcttctcctgttactgccattgtggttgatcctcatgctggttcctcagggtgcagaggagcaggcacctttcttgtagttcttactatagccatgaatataccttaccaaaaacagcccagaccctcaaactcaactcattcatctgttctttctgcttagatacacagagctatttcctcctaagacacagggtcaaaaagagtttcactatcatccacttaacatccccaaaacttaggtttgagtcaggtcaaggtcaccatttcaaattccctcttttctaatgtgaattttatctatgggaccttttgtcctatctaccacccagtcttgatcaaggccacacagcattatggcaaatgtttcaataattttaaactacaagtaaaggagtcaaatgggcaaatgtttttatgaatatcctctcagaatgcccccatggtcttaggcatattgctgtaacacctccccataaacctcaaagttgcagtgacaatgaagtccacacgttccatgaaaccctcattccagaacaatggttcagtgtttgtttttcatttgtgtaatgaaagagctcaatctactatttttcaagatataaagaaggagtcttccaaaggagtaataaaggcttctgtcactagaaaaaaatgtatacctcactttttaatcattggttctccaactttatgaataagtaaagtcccacctctaccaagtactttattgtatatgttgctaacattctggagatattttcatttcggtagacacataatgtacattgaattaatgaaaatgaaatgacaatgtttattaaaacagagatgtgattggtttggggcccacataattcactttagagcatccattcattcaagctacatagtcaacatttgccctttatttatttagcaactatcaggtatcacagcatgccccgcactctggcctcctgaagtctgttctcattgtcaacaaagagtgtgttttaaaaaccaaatactatcgtgctcttaccctgtgcagaaccatgccacagttcccatttcttttagaagaaagccctggccccacctctccaaggctttgcagagctggctcctgccctcctctccattcttgtgctgaaccacatggcccttcagtcacatgtggccttccctgaggtccccacgtgagccatgtcccttgttgccacaggaacttcacatgaaataattcctcatcctagccatctcccgcctcatgtagttaaatcaccttcattcttcacagggctgctgtccagcagaactttctgggatgatgggaatgctctagatctgcctcacccaatacagcagccagaagccaacagtggctactgaggacttgagatgtgtctagtgtgatgaagtactggaatttaaaagtttatttcactttagtaaatgtcaataccaataagcatactttaaaaagctcaacatcactgatcattagagaaatgcaaatcaaaaccacaatgagataccgtctcgcaccagtcggaatggctattgctaaaaagtcaaaaaaacagcagatgttggtgacgttgcacagaaaagggaatgcttatacatggttggtgggaatataaattagttcaacactattgtggagagcaatatggcaattcctcagagacctgaaaatagaactaccactcggcccagcaatcccattactgggtatataaccaggaatatacatcattctaccataaagacacatgaacatgaatgttcattgcagcactattcacaatagcaaagacatggaatcaacctaaatgcccatcaaaggaagcctagataaagaaaatgtggtacatatatgccatggaataccatgtagccataaaaaagaataagatcatatcctttgcaggaacacagatggagctggaggccattatccttagcaaagtaatgcaggcaccaaataccacatgtgttcacttataagtgggagctaactgatgagaacacacagacacacagttgggaacagcagacactggggcctactggagggtgaagagggtgaggagggagaggatcaggaaagataactaataggtactaggcttaatacctcagtgacaaaataatctgtacaacaaacccctacgacatgagtttacctatataacaaacctgtacaaggaccccgagcttaaaataaaattaaacaaataaaggccaggcacagtggctcatgcctgtaatccaagcactttgggaggccgaggtgggcggatcacctgatgtcaggagtttgagaccagcctggccaacatggtgaaacccagtttctactaaaaatataaaagttaggtgggcatggtgtcacatgcctgtaatcccagctacttgggaggctgaggcaggagaatcacttgaaccttggaggcagaggttgcagtgagctgagatagtgccaatgcactccagcctgggcgacagagcaagactctatctcaaataataataataataaataaacacccacatctggctgccatattggatggtgcagctctagaattcagtttaaaaatctttcctcacccttttagttgaggtagatattatatgttagtcctatactttttttttttttttttttgagacggagtctcgctctgttgcccaggctggagtgcagtggcgtgatctcagctcactgcaagctccgcctcccaggttcatgccattctcctgcctcagcctcctgagtagctgggactacaggcacccaccagtcctgtactttttaatcataggacttactatataaattccatctgttcatcatatgattgtttatcttcagtttcccctattagtcaacaatttccatgaagtcggggtcaggtctgttttgttccatattgatccgtagggcacagtacaagtgctggcatgtggtagacaagaatgtttctgaatgagtgaatgaatcaatgaataaatgagactgtgactgtgtgaacagaaaatcattgtacatctctaaacctcaatttctttatcaataaaggtctgcgggtcccttcaagcttaagcattttgtagatttcaccactaaataagaaattacagaaatgtggagcgaggtggaaagttctagacattacttgagaccattttgttcccataatgactttttctaaagcatctaagaaaatggcagtaatttatgattggaaggtcaaatatgccatgaaattttatcagagcacagtcctgccacttcattaagacacagaacctgtacaatccatatttgactgttgaaacaattcattgaggtgaccgtttacatttttttcaggaatgaaaagcttttccaactcaaagttaaaatctgaggtctcaaaatgtaagagacactcctggtaatcactctgtccctgatttatgcaatctagcaactaataaaatatggatcagagagatttaatataaatttgtaattatctttttacttcttattacttttggtaataacttttgtggctttctcatcacatcctctcctttcagaacaaagtaaaccacaccaaaagcacagaagggttcatttggccgagttgtcaaatgaattgtataaaaaatagaatgatggagggtttacattgaaattgaaaagtttatagccaatttaaacttggcaagagtcttgtgtacaatactgggttaatcatctgttgttaagattcagaatttagaaaagttatagtcatcttctggacctagcctaagagctctccttcttcccatattgccccagccatgctaaggttcttccctcctctttgcccagggccaatgcttaataaaaaatccatggcaatgaactcatcatgcagacagcaaagacagcatagcacagtggttaaatgcacaggcactggaggaactgtttatgtttaaacttaatctcaacctctatcttagcttcctcaactgtaaaatggggataattgtagtacctgctttgccattggtgtcagaacgaaatgaggtaataccatagagtactcaacacacataaagtgctccaagaacagtgactattgtgacaatgataacagtgggtcaaagaagaaatactacaaatctgtgtatgaaggtccggtactcaacattgtaaaacagacaatgttgccaataagtttgatgagctaccttttataaaacatttgtgttgaatttgataactaccaactatcaagcacctactaagtgccaggtgtacataaaatcccactctattctcccagtaacccaaagatgtggatgtagtggtagtagttgtggtaattgatgtactggtaataacaataaaaataaaacataacaatttctgagtacatattgggcctggcactgtgataaggttgttatatgtattacctcatttaattcctcttagcaaacctacactctaagaatgagaattactttcattttagagaaaattaactattgtccgaagaactaagaagcaagtccaagagccaacaattcgtgtggaaagctgagaatggaaccaggtttttctggctcctgatagatactaccccacctcaatcttatggtcttgggaattcagaactggaaaacagagtatgagtcagttaacagtaaaagtatgagctgtgtgagtatgtagaccaggactggggccaggatgtggtaagtgaggtgccctggataaaatatatatgtatatatggaggcccttaactctcaggaggaattcaaagtaggtagtatgaaaccagaattttttgtgtgcagatcattggaaatgatggcaaatagggccacttatccttctaccacagggttccaaaaatttgcattttctacctactggggacacagaatcatataaccaacttgactggggctgtgtgttagaacctagaggatggcactgcatcctcttcggaaagcatctccaagctttgcctcagttgcacctccaaaaggccattctgttgctcaggctggctgcttcagagtcgccacgaagtggcaggacccgtgtgctcacggccacatttcctttactgtaaagtgatccaacacaattttatgccagattctgtgcagatagatcaaatactgtagagtcttggaacatggtactggcagaggccctgcgagcaggacaggaaaactcagctggaataagtattgacacgactcaagaggaagcgttgtgccttgcgagtggaaaggagattgatgtaatcaatttgccaccaagtgactgactagactccttagggaatagtgtcctatcacatgcttggcacacattctgtggctggcaggttggatatccagcagtagcagcagctagacaagccttggtgattgaaaagtccttgctactgggccatgcacatcttccatccctgctgccatagctgctgcatcatccacttgctgtgccagcactggctggccaatgatagatactggccacaatcagctagtcgagttattctgtctccttgattatttagtgctttttctctggtggttgctctctggtgggcattggaatacaatacaaagaggttcacaccttgtgccttctcacatggttccatccgcatgctatttcctcaaatcatcttgatcccattcttccaaagccctttctttttttaggcccccaaccaatcatctgagcaacccccatagcctgtgagtctacattctattcttagggctcatctcttttcacacacagtgtatggctgggagcactgcctaaaggtctgccattgggaggatttctcttctctgctcttttctgggacatccctgagtgtgcaacagcttttgatctcacacaccgagccaacacatccatgaaacaaatgtggtccctttcattctttttcaggtggtcataagggaaccctcatgtggcctcatgtgtgtaccaatggataagcaatcgtacagccctggtgaattacatggggttctggatcacctgttcatggagctgatttgtgctctccagccttgtttcttcccaataccagatgtgccatgtacacctttccatgcattgctgctggacctggtaggtcctacatcattttgggtagccctggacacatggtcacttgatattccatggtcagggactccatctctacaaaagccactagaatgccaagagctgcttttaaaatgacatgcaattatctgctacagatggcatggctgcactccagaaacctagggctctgcattatcttcctactggagtttgccataaactgcactctgcatctttccccatcagatacttccaatgccatttggcctttcaggtcatatgtctaagcagcaggaccaattgcactgcagtctggacctctacagagcctttttctgctatcagccctattccatgctgaaagctctaggttattcagtttcccaccttgataaaagagagtcaagttttatacctccttgataagtctatgaattcaggctacttccaggacaaggaggttctctttagccaaaggaactttccagagagcaatccaactaagagccatcaatcactaacactctcaggagctgaaaaaagaatgcctcggttctgaaagaagggtctgggtgatataccagagaatccactataggatctgctttaaaggcctgaaagaaacttgcacagagagaattcaccagatacgtggcaactgcaggagcccacatatctcaagtgagagaaagaaacagagacttagagagacagacagacaacctaatgttttgctaattcttccctaaaattgggtttttaagtatctactgcatctttaaggtaactcagcttctcataagctaatctaattgagtttctgttccttgcaactaaatattccctgtgtctgtaagattttctacctaatggctgtaagtaattcgaaataaatagtaagaattcaaacttccagggttcgggaatgtagttcaaatgttagcaccatatattcactgtcaacttaaagagttctttgaggtttttggggggtttgtttgtttgtttgcttttgagatggagtctcgctctgtcatacccaggctggagtgcggtggtacgatctcagctcactgcaacctctgcctcccgaattcaagcaattctcctgcttcagcctcctgagtagctggattacaggcacccgccaccacacccagccaatttttatattttcagtagagacggggtttcaccatgttggccaggctagtagtctcaaactcctgacctcaggtgatccacccaccttggtctcctaaagccctggggttacaggcatgagccacagcgcccagccgttcttttagttttaaatgtaacatgaagtagaaactgaaaaaagcatacgaaacctaagcgtctgattaaatattacgacaatcctcaaaattaagtcaaacaacttaaaggctttattttatccaagtatggctctaatagcgtatacacaatttactccctaaagaccatacaattcggatttgtggatggttacaaaaaatgcaaagccagagagatgtttactctggaactatctatctgtgataatttatgagattatcttgagaaatacaatctgtttcacctttactcacccctaagtaataacactatcttaaaaagtctgttgcatcagttagctattgctgggtaacaaacctccccaaatatcagtggctttgaataagcatttactattgcttatgcatctaagggtcagcttggaagtttggtctgtaatgtgcttcatgacacttctgagatcagttgaactttacatgggtggtgctatttgactgagatcttataatatacatggtttaggatgactttaaatggaacaactgaacttgcttttatatggacatttcccttctcgttagccagccttggctttttctcatggcagaggtagggtcccaaaagcatgagttgaaaatgtgcaatgcctcttgcagcctaagcttgaagtgacatatagtcacatttatcacattctattagccaaagcaagccacatagcaagacttgattcacagtggaaaaacagactctaccccatgatgagccaagcttcgaagtctcaatgcaggggctgtggatacagagaaaagatgggttagagtcatttttgcaatcaagtacaactataagagactaatattcatcctagtcaaccattttctagctgtgtgactctgaataatttaactacttcatccgttatttattttcacaatttataaaatagataataatacacaatctgcctaaatgttgttgtgaatatcaaataacacataaagtacatgtcacaaagcctggtacatactcaacaaatattagctattatttcttgttgataatatttataaacttcttcattcattttttaaacttgttttatagatccaggagtggaggtaagcaggtatgaaaggaggatgacagtatactcaaaagcaaggaataaatgcctttatctcatattccaccaaaccaaattccctctggcctaagttctttcttgatgagtagttttgtaagttactttatgccaaataaaaacttcacaaatggtttcccaggataagacagagttcacagagcagccacagagatgtcaaaaacaaaagctgagtgaatatgacaataagtgcactgcttgtgcatttaggtttatttgcatttttcattgatattctgtacgagttcagaacagtagctaatccaagctaaatttacagcttgtaaaacaactaggttattaacatgacacacttcttatgccctgaactttcaaaaatattctaaataaagggaattttttttatctgtttaacagagaacaaaagagacagagaagattatgggcaaaaactggctaatttccaaatgtaggattttatcctaataagaatttcctttatcaaactcacaccactttggactttgaatatctttgctgaatagtttctttgtcttccaccactgtatcagtattttctcaaatcctattctttttgatgatgattagttgaatatatttttaaaaagtaaaatttttaaagacaaaaggtatgcatgtagactagaaaatagttaaacatcaactgaaaattaactggggcaaaaatgtgacttcctatttgaacaactcacaaatttcataacttagaataaatgagcccttttttttgagatggagttgtgctttgttacccaggctggagtgcagtggtgtgaccttggctcactgcaacctttgcctcctgggttcaagtgattatcctacctcagcctcccaagtagctgggaccacaggtgcatgccaccacacccagctaattttttttttagtggagacagggttttgccatgttggccaggctggtcttgaactcctgacctcaagtgatgtgccatcctcaccatcccaaagtgctggaattacaggcgtgagccactgtgcctggcctgaaccaatttcttgaaagacacaaactactacctcacaaaatgagaaagagataaattaaataggcatgtatctattaactgaatcaacaactaataaccttaaaaaagaaaacactggcccagatggttttactggtgaattctaatacttaaggaagaaatgataccaaatctattcaagaaaatagaagcagagggaatacttcctaactcatcatatgagtacagcactgtcctcataccaaaactagacaaagaaattctaagaaagaaaactacagatcaatatctcttctgagcatcatgcacaaatcctcaataaatattagcaaattaaatttaacaatgtataaaaagaataccacaactgagtatgatttactaaaggtgtataaggctggttcaacatttgaaaatcaatgtaagacagcacatcaataggctaaaaaagaaaactcatataattatatcaattgagacacaaaaatattgaaaaatacaacactcattcatgatcattattttcagcaaattagagatagtgggggagtcttcccaacttgataaagaacacctacaaaaaatctacagtggacaccaggcttagtggtgacaaagtggttgcttttacccttaaggttgagaacaaagcaagattgtcctctcttattactctctttcaacatcatactgcaagtcttagctagtgcaataagtcaagaaaaagaaacaaaagtcatatggattgaaaaagaaaaaataaaaacaaaaaacattgttgtctgtgtaaaagtcaaaaatttgacagaaaagagactcctcctggaactaagaagcaagtatagagacattgcagtatagagagtggttaatatacaaaaagtccaattccttttttatagaacagcaatgaccaattaaaagttgaaattaaaagacaacaccattatattagtgcccccaaataaataaaatacttagggattaatgttcaaaataaagaaaatataaataaatgaagaaatattctatgttcatgaattatgtcttcattcagtttggactgctataacaaattgccatagacacagtgccttagacaacaaacatttatttatcacagttctgaaggctgggaagtcctattgtgggaatcagggggaccagagagacctcagggtaaaggatgaggattttattgagtgcactcagacccagtggattaacatcctgagactgggcccagaacaaagaaagcacatgacttttatatacacttctaaaagggggtgggcgagcctaaaacaagcttaccatggcatgaagtgtagtggcgtgaaagcaaggatgcagtggcataacaaaggcagtgaatcaaattgtgacacgtgcataactcaggattacatatgaccattgccaagcaagccagatggctgttatctaggcttgctcaggcttcttgtgacctgcactgtatttctcagataaaacagaatacttgaagttactagttacagagaacaggaatctataaactcataaaacttgcagagtaaggtacaatcacatggagagaggtgggattctagggggaactttactttttcttatccttatgttgagggagtgctgggagagtctccacaacacattcctttgtgtcctagcttcttagatagtgtttatcaaggcttttcctgggtctgggctgtgcctgttcctgcctctgggataaatcagcctaatacagtaaagcttatttctttttctttttaaattttattttcctttaattctttaatttctgcctcagtccaagattaaggtgctatcagatggggtgtctctgaggaccaacattctgatttgcagatggccatcttcttgctgtgccttcacatggtagagaacagggagggtaatcaagctctctttggtcttgtcttataatggaactatctcattcatgaggactccacctttataacctaattacctcccaaagtttccacttcctagcaccatcacactgagggttagaacttcaacataggaatttgggggtgacaaaaacattcagtctatattactggaaaattcaatattgttaagatgtcatttctcaacaatttgatctatagatttaatacaattccaaacaaaatcccaggaagctatttatagatactgacagactgattctaaagtttacatggaaagacaaaatcctgcaaaactaaaaagaaagaaaaaagttagaagcatcatattacttgatttcgagacttactacaaagctaccgtaattgagacagtgtggtattggtgaaagaacaggcacataggtcaataaaacagaagggagtgcctagaaatagacacaaataaatatggtcaaccaatctttgaaaaaataaacaatgagataatacattttagtgatctgactggtaaagatattaaatatagatgctacccagagtcggtaaagttctatggaaaaagacatcctcttacacactattggtagaagtgtaaagttattgtctttgggggagagtaatttgccaacaaacactataattttaagtacacagcaatttcatctttcattatttatgcttggaaaatattaattaatagaaaacttatatttacaagtagaatgtagtaggtcatggcaggccaattatcccactaaaataactatttaaaaattgtataaattataaaaattctgtttatatttctaggaagcaataaggagctgatgaactcaaatttcaggctggaaggaatctcttcaactctttcagggttgaggagacaaaggcttgccaaaattgtaataaagtcgtgcccaaggatctaggataagccagaaattgagactcacattttcctacctggttccatgtattgtaattatcaagagaaaaacagagaatagaaacagacccatagatgaccttgatattgatattagcaaacactgactttaaaataactacaattaatatgtttaaaataacagaaggaaatatgaacaatgtggatgaaatgacaaagaattttggcagagattcagaagctatcaaaagaatccaataagaataagagaaatgaaaaatataataatatctaaaattaactcattggatggacttaatactataatggaaattaaagaacacagtgttttaaaagcctgattaacttgttgattgaagtttataactaaattatgtatttaatgcaaacttctagaaatcctcaaacttgggtagagcatattactactacattactgctctgattttaaatttatatataaacttttatacatcacttattgtgggtgcctgtaatctcagctactagggaggctgaggcaggagaatagcttgaacctgggagaaggaggttgcagtgagctgagatcataccattgcactccagcctgggtgacagagcaagactccgtctaaaaagtaataaaaataatatttaatttcaaaaaaagaaagaatatggtattattaaatccaaagacaagtcagcagaaaatattgaaactaaagcacagaaagaaaaaaaatagaaagaaaagatcagagcataaatgttggattagtcaaaaagcagataaggagagacccagaaaaaaattaatagaagcaatagcagcatgtgaaaagatatgacattattccaaaactattgaaagatgtcaactcaagcagaataaatacaaagaaaatcacatttaggtacatcatagtccaacaactaaaaaccaaagataaagagaaaatcttaatagttggcaggcaaaaacacatagtcacatttccaaagagaaatgttaaggattttcactttagtgttgtttgtaatagcaaaaagaaagaaaagaaaacaatcataaagtccatttacataggaatatttaaatgtcttacagaatctccattctatagaatagaattttgaaacaatgaaatggacctatatgcatttatataaaaatatctctaagacatatagtgtatttttacaatatgtaaatgagataatactatacatattatttaacttgtttttccccttaactacataattataagcaaatatttatgctttaaattttcagaaaggagaaatttatagaaggatatgtatagatacatataaaacaataaatgtatacaaagataacagcaaattaataacagtagtttttttaattagttttctcttttagttgttataaattaccacaaacttagtgcattaaaacaatacaaatttagtatcttacagctctggaagtcagaactccaaaatggttcaatacagctgtgtgttctctgtaggctctggtggagaatctgttttcttaccttttcccagcttctagaggccacctgcatcccgtgactatggccccttcatcactccagcctctgctttgattgtccaatcactttttctgactctgaccctcctgcctcccttctctaaggacccttgagattatactgcatccacatggatactccaggataatctttctatctcaagatccttgacttaatgacatcaacaaagctataatttaagtaatacagttacaagctttagggattaggatgtgaacatctttaggggtgaggggccattattctgtctaccaacatggagtataggagagtatttctctaggcactttaggattgtgtgaatcttttacaagaaaaatatgtttattttctattggtgtaattagaaataaaatgaaaattaataaagttcttaaagtgattgagagtaccaatcaaaggtaggttgaaggtcaactttactaaaaaaattatggtgtgtatttagtataaaccatgtggccaccaactttggcacagtccttagcccacagccctcagtaaaaaatagagctaagacccttgagagaacctctcgaggtgcccaattggcctgacactccctttgtactggcctgactactgtgttgagacttccttgactgttatatctgctaaagttgaacaaaaataatatgcctattctctcttttgataaagaaactccagaaatggaagttctggaataaaaaggacacttttatttgtttattttcttgtctctatttgggtctttttaaaaattcagatagccaaatgagaactcaagctatatccaactcacaatgtgatcactcacataaagcaatctcaaaagaaacttccactgcttcagagaccaagggttccttggaccgatggcatgaacagagatatggtcacttggaatgtcttaagatgacaaaggttataaagccaatctaaacctggatatatctgactttgttttagccttcattggtacttgtttaaaggcaatgacacaatctgcttatgtaataattactatcagcattaatgatgtgtctgtcattccaagaccaaaagaaagaatgtttgaaagagagagaaaaatcaaaggatgtttataatgagaaaattatatgtcgaaggggaaggcagtaattcttgacaatattataagaaaattcttaaaatagcaccaatttttcttgttaacagcattggaaatgagagagcagcagtattttggtgagtatgatatttttatgtaaataacaagttgccaagaagataactaggaaattgtagactttagaaattaggttcatcagccatttgtacctatcctgccccaggaagaaagccttgtctgaactcttcaaaaaattgaatggagccaagataagccattcttattatgtgttcatattttttaactgaactcatgtaaatttctttagaggaagtaaaagtatttgtaggagattgcagatcaaattctggctccgtacctcactagatatgtgaccttagacaaggtctttgagctttctgagcctcagcatcctcataaaatggagaaaataatatttacttcctaggattggtggaaagattagacaaagcacttaatatagtgcctaccatatagttggcattcaaacatacaacatgcttattgcaactatgattcatcacccctcacaaaccctctcctactcccccacacatgccctgtcttaggtttcctgtttcacgcccctttcaacacccttcaaaagatgcatggtatgactgcgaagacatgaaactgaatttttaacatacaccaaaacctctctaccaaccagcatgtgcgttggattatttttttcctccatgcagtcgcatgtgaaggtgcacacttactccaaatgggtggaccatttatcaaaccattcttgaaacttcagtctgggaattgccttcagttcagttcaaccattctctcaggaaaacctctcattgttttatgagcatctctggtttagaccaacaagagcacacaattccttctttattcaactaatattcaatgaaacacattatgtatgaagaactatgcttgcctgtggatgtattccagtaaaatagacaggatccttgacatcttgacacttacaacatagtaagaagacaaccaataaacaaataaagtagataaatatatcattatacattaagacaaatgctacaaaggaaatgaacatggtacagtaatggaggataactgtggggatgcatctatttagtcagtgaagaatgataatctcttaattacatagggaaaccatcgaagggttttaagctggagagtgacaaacctggacttagaatttcaaacaggcactcaggctgctctgtagaaaaatgaatggagggtaaaagtgtatgaggaaccagtaaagagtagatatccaggcaagaaatggttgtgcttcagatgagaaccctagtagtagctatagagagaagcatatgcatctgagagggatttttgaattagaaaaggcagaattggatgctgaaggtggggagtggaaaaggaggaatccaagataactcctagggaagctggattactgatgaagccatggagcttcagctttgggttcttccttatggagaaaccccaaccaaggctttagtgaaggtcttaccaataagttcttggggtatctgcgtacatattttaaatggaaggtcctcaaattacataagcctcagacccctcaaagcctgtattttcctgctccctgctttgcactttaaccaccaggtagacagggacccattttgtggagatgagaaacaagtgttgtgggaagggttggagttccatttggatgcgtggagttttggtgcctgtgggcattcagattatcaaacaagattctaaatggcttctgaatctttccagatatcaaatttactttcaaagaaaaaaactgtatcattgacaatattcagcttccaaactggtggttcttgatattttttaatcatctttgacctagccgggcgtggtagctcacgcctgtaatccccatacctttggagcccaaggcaggtggatcatttgagatgaggaatttgagaccagcctggcctacatggtgaaaccccatctctactaaaagtacaaaaaaaaaaaaaaatttagccgggccttgtactacatgcctgtagtcccagctactcaggaggctgagacaggagaatcacttgaatctaagaggcaaaggttgcagtgagcccagatcagagcactgcactccagcctgggtgacagggtgagactgtctcaaaaaaaaaaaaaagaaagaaagaaaaagaaaaaagaaaaagaaaacctataggcatttcctctgagaaaatgcactttcacctatggtttaattcaccctaacccaagagctcaccggtcccctaaatgcagtcaccacaccatgactgtaaatgcagtcacgacaccatgagagaggtgatgagcagatgttcttttccccaaagattatactgataggcacaacacctttttcatatacgaattttgaaatatttgttaaaatcagcactattgcttcaccatctcaccttattgctataaaggcaatacatttgaagacatttgaaacagcatgatttctctgcttaaaccttccgagaatgtttattttcaaagcacattcccatcctttccatgttcccaggcaatggtattttaaagaactgaatgtatttcctagcctcgataatatgtgcacttttttaagaacattcattgatcactggagaaattcatgaatactaaatattgctctgcagaatgttatttgctagttttctcctctgatgtcactcaaacatcttttgtttattcaccaagtcgtattacaatgcctctgacttttctacctaattccatgataaacttggaaatggaaagcattagtaggtgctcctcctcccattttgctggtaggaaaagaaaaaggttatttgtcagatcactgaaccatcgatacaaaatccatgtagacctaaattcagtttcctatgacagtagcagcttctacataatttggttatctggaaattaaagggaacccctgaaacaaagagaggcttcagtgtctttgcagtcccccctgtggaacccacatcctattttttaaagataagcctcttatccatttatcacctccactagacagggagccccttgaggataaagacatccataaacctacctttctgaccacacactttgcacattgtaaatatgaaatgaattataaacttgttttggctgcctagctttgtgaattcaaaatctgtgtgcttttggttttgtgtttcagctacaatattttagcacctgctgtcctgcaggtactttatgaagcatgttccacaaatcgtctcattgattcctcatgggaatcatgctggcatgattgtctccattttgctgatgaagaaacagaggctttgaggaatttagtgacttgcccagattgctcagcattcaagaagccttgtctgactgccacgctcttgctctttccattaccccatacgggctccactggccactctgctaatgctgacttggcctcctaaatgtctatcaggcactccaagcatggtcctacctcagggcctttgcacttgatctctcagccatttataccactcacttcctcatatcatccacaccttaatatcatttcctcagagaggctgtggcagaccacactatccaaaatagaacttctcctttcccatggccacggctctgttttgtattttttgtatgcttgtagcacacactcagctatgactatgttacattatgtgatacaacttgagttcaactatttcctaaacttttagaactgaagacatttggagactggttgcagatgacttacttttgtagttattgtgtttccctccatttgttttgtgtttgtaagtagcagttttaccatttaccgatgcatatggtttaagcagataatagaaggagccaaactgaaagcaggtgagcagcatcaccacccctgtggaaacttttattgtattccttttgatttgtgggcatttattattttctgtttcttcttttattgctataagcaccagtttccatccccagaaaaggttaactaaaaattaatccacaaaaagattaaaatgggatgtgtttcctaagccttgttttcatttatcatctttgtgttcttgctagtaaaatcttttggcacttgttttaagtttgtattcaatgagaattgacagagcgtgggggcacaagtttagccgtgatgaaaatttcacaaaggatgtaattaataacaaaaacagcaataaggatgatagctggcacttcatgaatgctcactacaggcgaggtcgcattctaacaccctgtcacataagtgctattactaccagggatggatgaggagactgaaacccagctgttggaaaactagttgataattgagtggtagaggcaggatttaaactcagccatttcgatctaaagcatgccctcttagctgctttgtagctggctattgcaggtgcatttgggagctgctaccagttttcctttcccctgattcagtatgatcatcctccagggactgttaatggagctagagtccagctgacagaatcagaagcctgatgcgctgggagtcaatgttagatgcatcctgaagttgtcctaataatgaggtttaatatttattcaatgcttctctaagtgcttacacatttcataacatcttttgatctccccatcaaccataagaggcatgttatgctcattttacttttagggagacagaggcaaaaaaaaaaaaaaaaaaaaaagtccagatcccctgccccagtttgcccagctgctaagaagggaagacaagagtcagaccctggtagcttgcttcaaaagccaaaagccatctcctcacccactgccttatctttaagagactgaagcttcttgttaagatgcagacttcatggtgaatttttatctttttctctttctttcatctaaatatctcaagggacagactgtgcaaggagtctttaagccatgaatactctttagaacttacaacagtaaaaaataataggggagtaggaaagagaaacggtttccataaatcaagagggttttttttctcttcatatgggcattttcaaatggtgtggagttttccaaacaacaagatttttatatttgtgggggatttagattcaatcaatagcctcagatttcacatgattaaagtaattctaaacctgtcaaaaattctgacccataaaccacatctatatgttggaaccagatcaaccacagaagtcaaaaatcttattttttgagatgtgtcatcaactgggcagtacatagtgaacacccccaagtaacacaactcatttgtgaaaacaattagaagagaagcccttcaaggatcaagaaatgaaccatcaaacccatgtctttaaatgtttttaagcacagtctcactaccatttgaaaatactcagaaactgtcaacaaactctcacatcatggtgaaaagcaatactgtaatggtctacatttaataggtatttcgacacaagttgaaaagttgagtggcaaactgcttcacaaacttagtgtgcacaggaatcacctagaggttgggatgggggacagttcttgttaaaataaatacctaattcagcaggtctgtgttagagcttaagattttgcattccacacaagtttccaggtaatgccaatgctgctggtccaggggtcacattttaaatatacagcttagatcctgaaaatgtcacaggctatgaggtcagacagatctggggctgaaccccatttctgccacttcttggctatatgacttcgagcaaacgtttatcctgtccaaacctctgtttcctcatctgtgcaatggtgcttgataaggcagagccccataagattgttgtaagagtggaatgtaattacctgtacagtgcataaaaaagtaggaattcaattatcaaaagccatattagtactaattcatattatttacattattatattaataataattattagctaaagtgattgaaacaaactgggaaaggatgctagagatgaagttgaaaatgttaatggaatcccaaaagccatcaaatgagtttctttcactcatttattgagcatctttctgtgccagccatagcttaagaatcttgtatgtatagtagccccccaatacataagggatatgttccaagacccccagtagacacctgaaaccatggatagctctaaaccttatatatactatgttatttaacacatacatgcttatgataaggtttaactttgtcatatgataggtatgtatgtaaaagattaacaacaattagtaacagaacttttataaccatgtattgtaatgagagttacgtgaatgtgcaaatgcgcgtgtgtgcgctctctctcccttcctcaaaacatcttcatatttttgaacctctgtggatcacagtaactgaaaccaaggaaagtgaaaacctccgatgagattggactaccgtatcctcccataactgaaagcgtaaatcggctcatttagttattaccagaagccatcaagtagatggtaacaccagctgcatttcacagagaagggaacaggttcaggattattacgtaacttaccctaagttttacagcccacaagtgacaaaatgaggacttgaacttgggtctttctggctcgcaagctgttgttcttaaataatggccttgagtacacagctggtagactaatgtgagtgaggtgtggttcctaccttactggacctctcagtccccagcagaggctagctgagggtaatttaagatatacttccaacagacaaagccatttcaattattctaaaagaattggaaagccttatcaatgaagcatcttcttacatagattttcagtaaaaacctcagcattggtatgttgtcaggaggaatctttggatacgctgatctcccagttattctttagaagcctagttgctctagaagtaagcaatgtaaatgtcttctgcttgaatttcctcatctattaaatggagccaccttcaaggagttattccactccttttgtaccaaattgcttttcacttttcctctagttcatgcctatgtaatcctgagtatttcatttgctgacttattgatgctggacacaggtgagagacctagtgaataaagctctgttctttgattgcttgtataactcagggctctatttgccacaagtgacagaaatccaattcagactagcttaagaagaagaaaagttatttggtgactcacctacctaagaagtctggggataggtctggcttcaggaacagcaagaccaggggttcaaacaatgtaatcaggacctagtatctccatctctcagttctgctttctttgcgatgacttctcaggtatttttgatggtggcaaaatggcctatggtaacttaatgcttacatttctaccagaatgtatattttcttcccagtggtttcaggagaagtcctgggatttactctgatgcagtgatttgggacacaggtctatccttgaaccaatcatcatggctgagggaatgaaatatgctgattggccaggccttgatcatgtgatcgcatctaagccatggtagggcagggttatccagtaaccaggaggatagggtgtgggaaaaggtgctctacaaagatgctgttgcccatataagagaaaggaaatgttaggagacgaaaatattagaaagccaccatggtgcttacagatagtctcacaagataccaagaaatcccaaaaggattagaggaagctgcagagttaaggagttagagatgcaattgtgaaaaggtttattccatctttcctgatgattatttccaatgctataacatggttctgacggtgagcataaaagagctttaaaatggtggaggaatgcaggctgatgattgggaaaagagtttcttatgattgctcctagtccacaatgatacagactttgaggcagaatgaaggtgtgattctgcctaccttccctatttctctgtggacactggaagataataaaatttcctaagttactacaaaagcgatttatctttatcatggattttttaggtttctccgagatcccaaagagcaattacttctgtgaatgaggtattctccctagcaacctaggggaatatcaatgtggactctggtactgaaaaactgtagcaaaacacttttctgattgccacttgatgtattgaagaaattcagtctgtaaatgcaaaatatatctatgtgtttgcatgcacattcacacacagatttgtagaaatcaatcagttaaatgcagtagaccactcaatgctaaagagttaagcaaaaggtagaaacagaaaaattatcatgaccagcacaaatgctctctgggacctcagggatctggaaaccatggaaatagcaattgtattcaaggttattttacatgatccacatatcaatgaagaagtttcatatttggggaatttaatgatccacaaaaaatttccagcaagttaaaaaactatatagtgttgattagcgtattggattttcacaactttttcagtttgatcttgtcatgagggacaccaaagagttgatggacttaataaattaccctagaaactcagtaaagagtgcaaatctaagataaatggtactgaaaacattttccaagatcctatctatgacttttacaaagttggccctccttgcttggagaattcagaattgctataagtgtaagtagcaaaaacttcagttccaactgacttaagcaccaaagaaattaagataattttctggtttatttaactgaagaatgcaagatagcctgcaggtgtggctgtatcaagaactcagttgccatctggacttggttttccctcttcttttcagctctgcttctattgattgattttatcctcaggcctcatactgtggcctgcctggctccagactggcatcatcccaggttcaagacagttggaaatagactgccttgctggtatgatacaagtgctgagattctctccagatagatcaagctggatcatgtgtctctcctgaatcggccaccgtggccagaggagtttgagtccctgatttgctacctttggagaacagagttcattttagtagggtggtttctcaaaagaaatgcaaaatgctattataagaagatgaaaaacagcgtttcttcatagcccacaaaaagaggccattaatgggtcttgaaagagctacaagcagatctaccattcaatccagcaatcctactacttggtatcttttcaaaggaaaagaagtcattatatgtaaaagacactttcacacacatatgtttatgcagcatattcacaactgcaaaggtgtggaaccaatctaagtgcccattgactaatgagtgggtaaaaaaaaatacgatatatacaccatagaatactacttggccgttaaacggaacaaaataatgtcttttgcagcaacttggatggagctggaggccattattctaagtgaaataacacaggagtggaaaaccaaaaactgtatgttctcacttataagtaagagctaagcgatgagtaggcaaaggcatacagagtgatgtaattgactttagagactcagaagaaagagggtgggagaaggactagggatttaaaaaagctacacattaggtacagtgtacactatttggataagaggtgcactaaaatctcagaattcactgctatgtaattcatccatgtaataaaaaaaaccagttgtaccctaaaagctactgaaataaataaaaagaaaaaaggtggggtgagggtgcctgggaagcaattaaagcttccatcaaggccaagagcaaatggttactcatagatagacaaaagagagccaccttattagtcttcctgactcatctgttttcaagtcattgttctgctccccatccagtttatttctagcccatttgcaaatcaaaaccacagactccacaacccagagctgttagggtttcataaaaaagtgatttttgggcccagacatgcggcttatatccataatcccaaaactttggaaggctgaggcagaaggattgcttgaggccagaaatctgagaccagcctggacaacatagcaagactctgtctctatagaagaaggtgttttaaatagccggatgtggtggcatacacccatagtcctagctactcaggaggctgaggcaagaggatcatcacctggccccagaagttcaaggttgcagtaagctatgattgcaccactgtactccagcctgggtgacagagaaagattgtgtctctgtaagaaaatttattttaaagatgttgaattttgtatgtgatttttctctttgccctaggcaactaagcccaacctctctggggccttttcaattaactagaaattatgcagaacaatgttcaatcaaatagtatggcttttcaaaggcacagtgaagaaagtatgaatggagaacctccagccaaaagttcacacagaagttttggctttatggggagtatttgaaagaaacattgaaaatatgaaatccaaataaataagaattgctaccctttacatataaaatggagaaactgatttttcttcagtacaacacatgcttctatattttcttcaacagatgtttctttccttaataaaatataagtagataagttggcaattagcagaactcaaagaacaacttctaagacttctaaagacttataaaaactaagacttgtaaaacttcttgtctcttttagaagccatagctttgtaaatactgacctaaagtttcccaacatcctatgccatgcttgctgctaagaataaattaaagaaacagttaattatttataaaatgaatagcagatatactaaaggagctcccttcttgaggatacaatcatttcctaaaagaaaaatcattttatcatgagaataattactccctaacctcaggataaaacataaatatgtgccaactcttcttgattcaataaccaccttgagtaggggtcagcaaatttgttctgaaggccagatggcaaatattttaggctttgtgagatatgatctctatcacaactactcaactctgccagcgaaatgccagagccccataaacaaataaaccaggggctgtgttctaataaaactttatttatgaaaacagggagcgagcactatttagcccgactggccataatctactgacctctgacctagaacgcagtgttgagatggattctgaggttttgtctgagctcagtaggagagactgtcaagatcaattggtgatgcctgctaaatgggaggaaaggaagtgtcacagcacttaacccttttgccatttaggaaaaaaaaaaagtgcagctcgctgctggcactcatttaattttacataaacacactctttgaggctgaagcaaatcctactgattttcaatgtgaaaataaaatataaaaaccattcttggagttatttctaaacagaactgacatcaggatcatctgaatcattagaatcatctatttcagaaaaatctaattcatcaaatgaatcttcggtcaacaactgttcaagaacaatgttaacatcactcatagcaatgctacgttttcagccgggcacgttggctcatgcctgtaatcccagcactttgggagaccaaggcagatggatcacgaggtcaggagatggagaccatcctggctaacatggtgaaaccccgtctctactacaatagaaaaaaaaattagccaggcatggtggctcaagcctatagtcccagctacttgggaggctgaggcaggggaatcgcttggacccgaggggcagagattgcagtgagctgagatcatgccactgcactccagcctggcaacagagagagacccaatctcaaaacaaaaaaaaaaaaaaaaaaaaaaaaaagaaatgctacgttttctaggatttgacattttcagctatcaagaattactatattttgtaaatggaaatactactactaaaaatagaatgctgtaaatagaatggtctcttttgtttccaaagtgaatatatagagcaatgtgaaaataataataaaagcgagatatttcatggcaaagttatctcggggtaaatgctgcagctgtaagcaccaccagtgagtattcttggggcaaatgggaaaacggttaaactgaatatctgatattgctgcaaaccaacaatttgttattttatccacatgccccaaaatgtcccatgtcaggaattgtgaactggctgcctagagtggaaggggtagtgtggattttcttttgaggttaactaattgccctagatagggatcaagtttatgaccttgggcctcattagcatcagccttaaccagctgcaatatctcgctacagatcaggctgtgggaagagcaagaaaacataatgtctttgttcttttgaaacagtagcaactcacactgagaaaatgatcattaggagaacgaagagttagtgtctgtcttaatttaatctcttgtcgttagatatccttagctcttctacttcagggactgtagactaatggaacttatattaaacattctacaccatcaataagcagaggctgctgctatctcctttacaaggtagataatacaccacttagtaagaaaactggaaattattcccaaactatataagaatatgagagagtggctggcaagatgaccgaataggaacagctctggtctgcagctcccagcgagatcaaagcagaaggtgggagatttctgcattttcaactgaggtacctggttcatctcattggtactgattagacagtgggtgcagcccacaaagggtgagccgaagcagggtgttgcctcacctgggaagcacaagggctcggggaactccttcccctagccagggaaagccgagcggcactgtgctgtgaggaatggtgcattccggcccagatactatgctcttcccacggtctttgcaaccaaaaaccaggatattcccttgggtgcctacagggccctgggtttcaagcacaaaactgggcagctgtttgggcagacgctgagctagttgcaggagtgttttttttttttttttcataccccaattgtgcccggaacaccagtgagatagaaccatttactcccctggaaagggggctgaagccagtgagccaagtgctctagctcagcagatctcacccccatggagtccagcaaactaagatccactggtttgaaattctcactgtcagtacagcagtctgaagtcaacctgggacgctcaagcttggtggggataggggtgtctgccattactaaggcttgagtagatggtttccccctcacagtgtaaacaaagccgccagcaagttagaactgagcggagcacactgcacagagcccgctgcagcttggcaaacccactgtagccagactgcctctctagagtcctcctatctgggcagggcatctctgaaagaaaggcagcagccccagtcaggggcttatagataaaattcccatctccctgggatagagcacctgggagaagcggcagctgtggatgcagcttcagcagacttaaatgttcctgcctgccagctccagcactgctctgaagagagcagtggatctcccagcacagtgcctgagctctgctaagggacagactgcctcctcaagtgggtccctggcccccatgcctcctgactgggagacacctcccagcaggggttgacagacacctcatacaggagagctccagctggcatctggtgggtgcccctctgggacgaagcttccagaggatggaacaggcagcaaactttgctgttctgcagcttctgctggtgacacccagacaaagagattctggaggagacctccagcaaactccagcagacctgcagcacagaggcctgactcttagaaggaaaactaacaaaaaggaatagcttcaacatcaacaaaaaggacatccacacagaaaccccatccaaaggtcaccaacatcaaagatcaaaggtagataaatacacaaagatgaggaaaaaccagtgcaaaaaatttgaaaattccaaaaaccagaacgcttcttcccctccgaaggattacaactcctcacaagcaagggaacaaaactggatggagaatgagtttgacaaattgtcagaagtaggcttcagaagttgggcaataacaaactcctgcgagctaaaggagcatgttctaacccaatgcaaggaagctaggaatgttgaaaagaggttagacaaattgctaactagaataaccagtttagagaagaacataaataacctgatgaagctgaaaaacacagtacaagaatttagtgaagcatacacaagtttcaatatccaaatcaatcaaggggaagaaatgatatcagagactgaagatcaacttaataaaataaagtgtgaagacaagattagatatggaacatatgggactatgtgaaaagaccaaacctacgtttgattggtgtacctgaaagtgacgaggagaatggaaccaagttggaaaacactcttcaggatattatccaggagaacttccccaacctagcaagacagcccaacattcaaattcaggaaatacagagaatagcacaaagatactccttgaaaagagcaatccgaagacacataattgtcagattcaccaaggttgaaatgaaggaaaaaaatgttaagggcagccagagggaaaggttgagttacccacaaagggaagcccatcagactgacagtggatctctctgcagaaaccctacaagccggaagagaaggggagccaatattcaaccctcttaaggaaaagaattttcaacccagaattttacatccagccaaactaagcttcataagcaaagaagaaataaaatcctttatagacaagcaaatgctgagagattttgtcaccaccaggcctgccttacaagagctcctgaaggaagcactaaatatggaaaggaaaaactggtgccagcccctgaaaaaacttaccaaattgtaaagaccattgacactatgaagaaactgcatcaactaatgggcaaaataaccagctagcatcataatgacaggatcaaattcacacataacaatattaaccttaaatgtaaacaggctcaatgccccagttaaaagacacacactggcaaattagataaagagtcaagacccatcagtgtgctgcattcaggagacccatctcacatgcaaagacacacacaggctcaaaataaagggatggaagaatacttaccaagcaaatggaaagcaaagaaaaaaaaaaaagcaggtgttgcaatcctagtctctgataaaacagactttaaaccaacaaagatcaaaagagacaaagaaggccattacataatggtaaagggatcaatgcaataagatgagctaactatcctaaatatatatgtacccaatacaagagcacctagattcataaagcaagcccttagagacctacaaagagacttagactcccacacaacaatagtgggagactttaacaccccactgtcaatattagacagatcaacgaggcagaaaattaacaaggatattcaggaattgaactcagctctggaccaagcggacctaatagacatctacagaactctccaccccattctgttgaatgtaaatcaacagaatatacattcttctcagcaccacatcacacttattccaaaactgaccacatagttggaagtaaagcactcctcagcaaatgtaaaagaacagaaatcataacagtctctcagcccacagtgtaatcaaattagaactcaggattaagaaactcactcaaaaccacacaactacatggaaactgaacaacctgctcctgaatgactactgactgggtaaataacaaaattaaggaagaaataaataagttctttgaaaccagtgagaacaaagacacaatataccagaatctctgggacacagctaaagcagtgtttagagggaaatttatagcactaaatgcccacaggagaaagtgggaaagatctaaaatcaacactctaacatcatagttaaaagaactagagaagcaagagcaaacaaattcaaaagctagcagaagtcaagaaataagatcagagcagaactgaaggagatagagacaagaaaaatccttcaaataatcaatgaatccaggagctgtttttttaaaaaaaagattaacaaaataaactgctagccagactaataaagaagaaaagagagaagaatcaaatagacacaataaaaaatgataaagggaatatcaccactgatccttcagaaatacataccaccatcagagaatattataaacacctttatgcaaataaactagaaaatctagaagaaaagaataaattcctggacatgtacaccctcccaagtctaaaccaggaagaagttgaatccctgaatagaccaataacaagttctgaaattgaggcagtaattaatagtctacgaatcaaaaaaagcccaggaacagattgattcacagccaaattctaccaaaggtacaaagaggagctggtaccattccatctgaaactattccaaataatagaaaaagaaggactccttcctaactcatttactgaggccagcatcattctgataccaaaacctggcagagacacaacaaaaaaagaaaatttcaggccaatatccttgatgaacatcgaggtaaaaatcctcaataaaatactggcaaaccaaatccagcagcacatcaaaaagcttatccaccacgatcaagttgacttcatccctgggatgcaagatgggtttaacatacctgaatcaataaatgtaatccatcacatcaacagaaccaatgacaaaaaccacatgattatctcaatagatacagaaaaggtcttcaataaaattcaacaacacttcatgttaaaaactctcaagaaactaggtattgatggaatgtatctcaaaataataagagatattcatgacaaacccacagccaatatcatactgaatgggcaaaagctggaagccttcgctttgaaaactggcacgagataagaatgccctctctcaccactcctattcaacatagtattggaagttctggccagggcaatcaagcaagagaaagaaataaggggtattcaaataggaagagaagaaggcaaattgtctctgtttgcagatgacatgattgtatatttagaaaaccccatcgtctcagcccaaaatctccttaagctgataagcagcttcagcaaagtctcaggatacaaaatcaatgtgcaaaaatcacaagcattcctatacaccaataacagacaaacggagagccaaatcatgagtgaactctcattcacaattgctacaaagacaataaaatacccaggtaatacaacttacaacgcatgtgaaggacctcttcaaggagaactacaaaccactgctcaaggaaataagggaggacacaaacaaatggaaaaacatttgatgctcatggataggaagaatcaatatcatcaaaatggccatactgcccaaagtaatttatagattcagtgctatccacatcaagctaccattgactttcttcacagaattagaaacgactactttaaatttcatagggaattttaaaagatcctgtatagccaaggcagtcctaagcaaaaagaacaaagctggagtcatcacactacctgacttcaaactatgctacaaggctacagtcaccaaaacagcatggtactggtacaaaaacagatatatagaccaatggaacagaacagaggcctcataaataatgccacacatctacaaccatctgatctttgacaaacctgacaaaaacaagcaatggggaaaggatttcctatttaataaatggtgtttggaaaactggctagccatatgtagaaaagtgaaactggaccccttccttactccttatacaaaaattaactcaaggtggattgaagacttaaacgtaagacctaaaaccataaaaacccttgaagaaaacctaggcaataccattcaggacataggcataggcaaagactcatgactaacacaccagaagcaatggcaacaaaagccaaaattgacaaatggaatctaattaaactaaagagcttctgcacagcaaaaaaaaaaaaaaaactatcatcagagtgaacaggcaacctatagaatgggagaaaatgtttgcaatctatccatctgacaaagggctaatatctagaatctacaaggaagttaaacaaatttacaagaaaaaaacaaccccatcaataagtgggtgtaggatatgaacagacacttcacaaaagaagacatttatgcggccaacaaacatatgaaaaaaagctcatcatcactggtcattagagaaaggcaaatcaaaacgacaatgagatagcatctcacaccagttagaatgctaattattaaaaagtcaggaaacaacggatgtcagagaggatgcagagaaataggaacacttttacactgttggtgggagtgtaaattagttcaatcattgtggaagactgtgtggtgattcctcaaggatctagaaccagaaataccatttgacccagcaatcccattactgggtatatacccaaaggattataagttattctactataaagacccatgcacacattatgtttattgcagcactattcacaatagcaaacacttggaaccaacccaaatgcccatcaatgatagactggataaagaaaatgtggcacatatacaccatggaatactatgcagccataaaaaaggacgtggatgaagctggaaaccatcattctcagcaaactaacacaggaatagaaaaccaaacaccgcatgttctcactcataagtgggagttgaacaatgaaaccacatggacacagggaggggaacatcatacaccagggcctgtcgtggggttgggggtatggggagggatggcattaagagaaatacctaatgtagacgacaggttaatgggtgtggaaaaccaccatggcatgtgtatacttatgtaacaagcctgcacattctgtacatatatcgcagaacttaaagtataataataaaaaaaggtactaagaaaaaaaaagaaaatggaaagatgatacaaaaattcataagatggttatgcttttttcccccaccagctatacatatcatcaatgtagataaaaacaaacttactttttagaagaggtctcctaaaatgaaagaagaaagccagagatttcaaagattttaatcacacttgttgatttggaggtcactacacagattacaaaggaaatcaggaaacagttgtaaagtgtgaaccaatgaatgaaactcctttagaatgtgggcaaggctggcttcctggcaggtgacccatgcagtcacccagggtcctacatttagaagagccctgtattaggcttaatgctcagctgtcgctgtcttgaaattcttaataatttttgaacaaagggctgtgcattttgattttgtactgagcttcacaattatgtagccaaacatgaatgtataaattgctaaatataattcaattctaatctccttgttgcaatttgatgaaagttattgtgggactgtttttattcatttattcattcatgtttgtttgtttgtttttgaaatggagtctcgctctgtcgcccaggttggacatttatttaatgcttatgatattcattcatggattaactcccataatccctacacctgctcaaccacagagggcatgaggtggttaatatagagacagaaacatctgtgagacaggtcctctgccctgcttctcagcttcacagtttagaagcaactctaccagtggcttgcgaagaaggatgaacgaatgactctcagaagcaaaagcgagtcagagactgtgaagaacatagactttagccgtcatggaccttgttttggatgcttcctccatgtaccagatcgtgactctaggataattactttaacctctctgtgactcagtttcttcatctgtaaagttagcatgatcttagctgctttttaagtttgttgtgaagattatttgaaataaaatgtagaaaatacttgctagggacctgcacatagtgtttagttattaacacttctataaagtcatagaaatgtactttccctcttgtctgtaattgcactctagggattttttttcctaagggaaaaaaaaagaataaaactacaggcacaaagatattccttggaggatcatccaaggaatttattttatttttagaaaaggattaaagatgcttgttatctataatagcaaataactggaaacaacctaattgcccaacagtaatgtaatattgaaggtaattatggaacatcaatatgatagaatattatgacgacactaaaaacaataattatggaaacagcatagtgacatggaaatgggttttagtagaatgttatacaagagaaatagaatgcaaaatgccatgtctgctccatgacaatagggactatgtcagtctctttcaccactatatagccagcacctagtaaagaataagcactgggcaaatatgtactgaatggaatataaaaacatgtggaccagacttgaaaagtgacatgcaaatgtatgaaaatggtactgatggcattaaagcaagttttgtttgtttctgttgttaaaaataaaggagacaagaaagggatgaagcaaggaatcaaaaagagtagaaggaaagaagggagaaaggaaaagagggagggaatgagggaggtaaggaagcagaacaaacctaaagctcttctgtttatgacattgaaagctatgctaacgtaatggttaaaaacctagaccttctcacacctgtaatcccagcactttgggaggccgaggtgggtggatcacgaggtcaggagatcgagaccatcctggctaacgcagtgaaaccctgtctctactaaaaatacaaaaaattagccgggtgtagtggcaggtgcctgtagtcccagctactcaggaggctgaagcaggagaatggagtgaacccaggaggtggagcttgcagtgagccgagattgcgccactgcactccaacctgggcgacagagcaagactccgtctcaaaaaaaaaaaaaaaaaaaacctggaccttagaatcgcaggaacttacatttgaatctcagatcctacccctgccctttgcctaactggacaagttggacaaggtcagtaacttctcttaaatctaatgcacagattttaaatagagccactaacagtaccaacctcttgggaacaccatggagataatttatgcaaagcaccctgaatgacacataatagacaagcaatcatattcattgcttttaccattaccattaacatcattttataatcataaaaaaatctgagctgctaacctgtagcagagaaaacaaatgatgataaaactgtccaaccagacccccagaaaagtgtcctacaatatcaccaggggacattggtgctgaccaactgtcctgagctccttagagggatccaagagagaggcatagacaattcctccagtttaagggatcttgtttctcacagattcactgaaccaaggcattctctcatcaaaaattttcttgcacagaccaacagcaatggcttcatccatagaaataattaacatgcttctggcagcctttattgatattcggtttacaaagcagtgacctagagatacggcatctcttgcagattaatggctcacaagggtcattactggtgcaaagacacttccaggggttactgtttccttccaactggttgttagcccagtttcaactaccaaatgcttcatgcacacaagggtctccattagcagttgggaaatgcatgcaggagcaagatttgccttcatacactgcagtttgcatttttctaagcaaagagaaggggacttagtattgaaatcaaatgtatagttatgctggaaatcttcacaaaaaaaatcctcttctgcatatagccagtacaaggtctgtgtcaccacagttgggatggcttgctgctctccccaaagccattccctgtttcttgtctataacagaacacctattatattctgagtgaaattgtgcccagtcaaaagacgacattccccagctctccttgtagctaggatggctccagaccttgtaagatatctgggaaagcccttcttgccatcttgccatcttccttcctggcatggtaacatgatagctggagtgcccacaggcagcctatggccttaggacatattaaagatggtagagtcaaaagctgaaggatccagggtgcctgctgacttctggaagctgctacattaaccctaatctgcttacctcctatcctttttcatatgagggaggaaaaaaaaactttcaacaactgtgcagggctcaatgtcaccttacttgcaagacaacaagtgagcctgccacggtttcaaggattctggccgaagacatgagattcccaagtccgagactgaagagtttattactcacagcatagcaagcagcatgagccccgtggtcgggtcagctgcccattacctcccaggtcccaggagccaatgaggagcagccatagggattctgtgcctacccagccttgcctcacagctgaggaaccaaccacttaggaaaccctgattttttataatgcgctgtgagcaaatgtgtccaacctttaccttgtaagaacacactatctttattatactacacagcaaacaagtctattctctgcctcagagggagccactatctctatcttctaaagctgtttgcaacaaatattctggagacaacactccagaacaaaagctgccagtgcctctgctcacagaacgtgggaaacgacctcccaacatcgtctcctttgtgtaagccactgttatttcctgtctacgttgttgactgcagagtgaaatcctcgccagtttttccaatggctggaccttcttgtcgtttgccttgacacataatagaatctctgtcatgtggctctgtaatagattcagaggccacataaggtagaaaaaaaaccaggttaactctggaaccaaatttctgattcgagtcccacttctcattagctgtgtgacttaaacaagttacttaacttctctgagcttggtattcttatctaaaaatttggaataataaaagtagctaccttatggtactggtgaggatcaactgggttaatacacataaagcacctacatagtagctggcacagtcatatgtgagctgtgagtagagaactgtgcggtgatcacaagcacaacttgggaattctacaaacctgagtctgaatcccagctgcaccacttatgagctaaaggagtgggtgagcatcttaaccacttcccagtacatttatctgtgacccagcatgctgccctcagagagcaaaaaggttaatgcttatagaatgtttagtaccatccctggaaccaccgaaaactcagcaaaacagctattgttattgctattagtgttcattcttgtgttagatttaaaacttgttctttaatcgttttgagacaccagaagacccatggacttcttactcgccacatgaatatttttagtcaaatattattaaatttctctgattgcagacccctttaatcttttggtttcattttgacagaggtcatctggggtcacctcaacctcatcaaattcttagtcaattcaattgcatcatagaaaaacacaagttcttagagataaccatttttatgcctctgaatcagtgaaaaagaatttggtctttcttctttgaaaatgtctctgaactccatttgttctaaataatactttatgagaaagatccaagtgctaactgaaagcatttcattccccatatagttaataaaaatgagatctggaatttctcatctacactaaaatcctccaatgctatgcacattttaaagatgaatctaatgtattgaaacaatttcagaaatttgaaagtttaaagattttatagattttcttaaagattgatttgaattatttttaaaatacatttactagaatgtcactatagaaatttctttatttcatcacagctttttgacagctgagaaaggtctccttcatatttctaaattagatcctgtaataaatgcacagtcttgacttgagacaggtttattacatgaccaaaacccccagcagtaagcttataattaagcggtaatattaatagacagtcagcttgggcatgtgttccaataatgtacaaagctctgaaaagagctgaacattaggcaatagaaggattttcccctttattaaagtgtttggaatgatgtttcattctagcacgctcctacaagtgcatctctactcttcataactttttctcaaattcaccaaaataaatattggcctatttctgctaatatatttttcaactcaaaaaatggaacagaaaacaattctgaagaaatagtctcaagaactttaagggctatcattattgagccagcaagtccaaatagcagacattacaccagagtcagacacaatacaacaagcatttattgaagagttacaagaagttcacccttcatcatctggcaaacttctattcattctccaaagaggttcaggtatcctcccctctaggaagccttccctgatttcctttagcccacagtgaaataggcataggcatccccccgtgtcatctcacagttccctaagcacatcttgatcattgtgtttatccttccactttggtgtaattttttcaaagatttagtattactattagtgaataatactaatgttggcttagaacatagcaggtcctcatgtaggtgctgtgacaatacaggttttaaagaattgaaaacctctggctggactaatcaataaaaagagagaagtcacaaatttctgatattacaaatgaaataggtggcgtcgctacagtacttaaagagatgtttttaaagtaatattttgagcaatatggtgccattaaatttaacaaattagataaaatgaacaaattatttgaaagatacaaacaccaaaactcaagaagaaagtgacaacctgaatagccctataaccctacatcaattaatgttaaattcataggttaaaactttcccacaaagaaaactctaggccaggtggcttcactggtaaattctatacgctcttcacaaaacatgaggtgaggtgacacaccccaaatgatttaagaaaaccagcattactctgttaacaaaaccagtgaagatattgttttaaaaagaaaactaccatgagcatgcatacctcatgtacatggatgtaacaagtaacaagtagcaaaatctaaaaacagaatccaacaacatgtaagccatgtagagttcatcccaataatgtaaggttgttttaacttttgaaaagcaatcaatgtaattcaatgtattaacaggctgaagatgaaaaacatgatcatctcaaaagatacagaaaaagtggcaaaattccacacctcttcacaattaaaactttcaacaaattaggaatagacagcatctggttgtagatgtgtggtgttatttctgaggcctctgttctgttccattggtctatataccttttttggtaccagtaccatgatgttttggttactgtagccttttattatagtttgaagtcaggtagcatgatgcctccagctttgttctttttgcttacgattttcttggctatatgggctcttttttggttccgtatgaagtttaaagtagttgtttctaattctgtgaagaaagtcaatggtagcttgatgtggatagcattgaatccataaattactttggctagtatggccattttcacgatattgattcttcctatccatgagcatcgaatgtttttccatttgtttgtgtcctctcttatttccttgagcagtggtttgtagttctccttgaagaggtccttcacatccgttgtaagttgtattacctaggtattttattgtctttgtagcaattgtgaatgagagttcactcgtgatttggctctctgttgtctgttattggtgtataggaatgcttgtgatttttgcacattgattttgtatcctgagactttgctgaagctgcttaacagcttaaggagattttgggctgagacgatggggttttctaaatatacaatcatgtcatctgcaaacagagacaatttgatgacaaacctgacaaaaacaaccaatagagaaaggattccctatttaataaatggtgttgggaaaattggctagccacatgcagaaaactgacactggaccccttccttacaccctatacaaaaattaactcaagatggattaaagacttaaatgttagacctaaaaccttaaaaaccctagaagaaaacctaggcaataccattcaggacataggcatgggcaaagacttcatgactaaaacaccaaaagcaatggcaacaaaagccaaaattgacaaatggaatctaattaaactaaagagcttctgcacagcaaaagaaactatcatcagagtgaacaggcaacctaaagaatgggagaaaatttttgcaatctgtccatctgatgaagggctaatatccggaatctacaaggaagttaaacaaatttacaagaaaaaagcaaacaacctcatcaaaaagtgagtgaaggatatgaacagacacttctcaaaataagacatttatgtggccaaaaaacatgaaaaaaaagttcatcatctctgatcattagagaaatgcaattcaaaaccacagtgagataccatctcacgccagttagaatggcaatcattaaaaagtcatgaaacaacagatgctggagaagatgtggagaaataggaatgcttttacactgttcatgggagtgtaaattagttcaatcattgtggaagacagtgtgacgattcctcaaggatctagaaccagaaataccatttaacgcagcaatcccattactggttatatacccaaaggattataaatcattccactataaagacacataggcagcactgttcacaatagcaaagacttggaaccaacccaaatgcccatcaatgatagactggatgaagaaaatgtggcacatatataccatggaataccatgcagccataaaaaaggatgagatcatgtcctttgcaggaacatggatgaagctagaaaccatcattctcagcaaactaacacaggaatagaaaaccaaacactgcatgttctcactcataagtgggagttgaacaatgaggacacatggacacagggaggggaatatcagataccggggcctgttgagggggtggggggataggggaggaatagcattaggagaaatatctaatgtagatgacgggttgatgggtgcagcaaacaaccatgactcgtgtatacctatgtaacaaatctgcacgttctgcacatgtatcccagaacaagatggagaagaggaagaagaagaggaagaggaagaagaggaggagaaggaagaggaagaggaaatagcatcacagcatcttagtcggcctgggctgctataacaaaatatcataaactgggtggcttaaacaacaaacatgcatccctcatagttctgaaggttgaaagtcagatcagagtgctagcaggattgactttttctggtttatagacagccatcttcttactgtgttctcacatggcagaaagagagctagctagctccctggcatgttcttttaagggtactaatcccattcatgaggactttgtcctcatgatctatcaccttccaaaaacatcatccccaaataccatcacattggcattagggtttcaccatatgaatttgaggaaggaaggaacacattcagtccattgagaaagggaatttctttaacctgataaaaggcacatgtgaaaaacgtacaacaaacatcatactgaaatgttgacagactgaacatttaacttctatttcaggaacaaggcaagaaggtcttctgtcatcacccttattcaatattttactggagattcttgtcatcctaatgttgatgacaatcctaacaacaaaaacaaataaaatgtgtatggaggaagtaaaaatctgtttattggcaaactacgtagtagtaatcctaaggaatctaccagaaatagctactagaactaataatggtgagtttaggataccaagttttcagaattcaaggccaatgttcaaaagtcacttaaatttctatgtactaggactaaacaattgcaaactgaaaatgtaaaagtacaaactaaaatggcatcaaaaatatgaaacactttgtaataaatttaagaacgcgtagcaagacttgtactaaaaactgcaaaacattgcgactgaaattaaagagtgcctaaagaaacagaaggatacaccataaatgctcatggattggaagattccatgttgctaagatgtcagttatccccatactgatctatatattcaatgcatttccaatcacatttctagcaggagttgttatgcaaatgaatgagctgattctaaaatttatatggaaatgcaaaggacctgaaatagtcaaaataatttgtaaaaataaaaatgttagggaatttacaaaacgcactatagaattaaataatcaaaatagtgtggcatcactttaataatagacataaaagccaatgaaggagaataaatattccaggaatagactcacacatataaagccaattgattatcagcaaatgtacaattcaatagaaaaagataattctcaactatcttttcttgaagatggtactgtaacaatcagttacctatatttttttaaaaaaacctcattcattacctcacaatacacccaaaaaataattcaaagtggaccacagacctaaatgtaagaggaaaaatgataaaatttcaagtagaaaaacacaagaaataatttttatgatattgagttaggaaaagatttcttagatgggacaaaagcatgaactggaaatgaaaaatattgataaattgaattcatcaaaattaaaacctttgtcctgcataagatattattaataaaatgaaaaagcaaaccacaaattaagagaaaatactttcaaaacgtatatgataaaggaattacatctaaaatatattttaaaaactcttacaactccacaataagaagatcaaaaacagattaaaaatgggcccaaaatttgaatagttacccacactaaaaacaacatatgaataaaaaattagaatataaaaagacattcaacatcattactcattaaggaaatgtgttaaaactcactaaattgtacattggaaaaaatactactaaaaatgtaataaatttaaaatacaaaattataatgagatatcacttcacaccaaataaaattttagacttaaattgaacagactaatggcaagtgttaataagactatggaacagttcgaattctcatgtagcattagtgggaatgcaaaatattagttgccttgggaaacagactggcagttacttttttttttattatcatactttaagttttatggtacacgtgcacaacgtgcaggtttgttacatatgtatacatgtgccatgttggtgtgctgcacccattaactcgccatttaacattaggtatatctcctaatgctatccctcccccctccccccaccccacaacttgccccagtgtgtgatgttccccttcctgtgtccacgtgttctcattgttcaattcccacctatgagtgagaacatgcggtgtttagttttttgtccttgtgatagtttgctgagaatgatggtttccagcttcatccatgtccctaaaaggacaggaactcttcattttttatggctgcatagtgttccacggtgtatatgtgccacattttcttaatacagaccagcagtttcttgtaacgaaactatccacataatccagcaatcttaagacttttacctaagacaagtcaaaacctatatttatgtagagatgtgtatccaaacgtgcatggcagctttactcataataactataaactgaaaacaactcaaatgtccatcaatgggtgaatggatgaatacattgtgaggtaaccattcaaaagagtattactcaggaatacagagaactaactgctcatacacacaccaacatgcatgaggctccgaagcagcatactaagtaaaagcagccaggtgcaaaagactacatactgtgtaatttcattgatacaaaaatctagaaaaggtaaaactgtagtgacaaaaacccaaattcataatcacctgtggctgagagtaggggagattatttccaaatgggaccttttcaggataaaagttttgtgttgcgaccatggtgaaggcctcataattatatatttgcaatctcactacctaaccattgttaacattcttagtgtgttttcttccgatctctttttttctcccctaaatgtcttagaatttgttctaaggaaataatcagaaatgcaccaacatattagagtttaaaaattcattaaaaattgaaaacaactaaaatatctaacaacataaacataaacaaataacaaataacaatacatccctttaaggtaatattattgtagccaatgaaagtcacattttcatacaatttgtaatgacacatggaaatacttatgacacaatgtaaagtacacaagttagagaatactttatattcatgtgtctttgtatatacaatgtataaataaatatacgcatagaattttgtgatttctttgttctaaaacagggcaatactacccaatcaatgtaaaaatgccaaaaagttttctagaactggcatttgaaagaaaattaacatatgaaacaaggtcatgcaaagttaacttgattgtccttctcttttctcttctgagggatgaggagtcctatttgctcaataatctggttgtcagacttacagcaggggccgtgtccacagtacccatttacaggggactctcaggcagtacaacaaatttgacaatacattgagactaaagaaagtacagatattccagaatgagtatgaaaatgaacttgaaatcatattttagggacttggggacttgagaacactaacaatcttcatactatgaagcagtatggtttcataaaggactctggaggattcatagccacttgagcaagtcacttagcttgagatctgcctccatttctggaaaatggagaacaatgctttccatgatccctgcctcacaggtgcagcaaaaatcaaaggaggtaacatatgaaaaatcaattttgaatttacaaatcacaagtacaaggtgaggcaggattattatgtgactttggggccattaataattagcagcaacttgactgtgtttctcatctactgtggaaataggaaataactggagctcacagggcaaattacctactactagttgctatccccagacagtgaccaagagacttgtaaccacagccacagaagtagacggactaatttcaggaccctatcccaaaatgttacccttccccaagctggtgtactagagagactactgcatgttaagcaatagagacctaagtttaattatcagctacatgacaaatgatgcattatttaatttcactgaggccagttgcatctattattgaatgagaatgctaaaacctccccccagggttgttatgaggtatatatgaaatagaatgtgttgattctcaacagatcctatggcagagattaggtaccaaatgcatgctcactctccttcttgacttagatttccagaaatttctctaattagtgacactcagtgacagcccttttcacattcagaaatcagcaagggattgggaatggctggagaggcaagtacctgtccccaaatattcaggcaaaaatctgtaactgttaaaaacaaggaataactgccaaaaagtaaatatgacatatacaatagtgaaatagctcataattctatttacttcaagcctgtatttaataaatggaaatgcaaaaatcaagatggagaaaaaaaactatagtaactttctccagggagaaaaaacaaaacaaaaaacatggggcttactggtgtcttcagttaaaagcattcttgtaaagatgtgttttgttggcagtgtttgttggcagatgctattcagaaccaaggacagggcaaccctttggtcaaatatactgaggtctgcaccaacaggatgctggaacactgagaacaattcttcacgcatcatcctcatgatgatactttgcatcaaaacagcacttcatatttttcaaacaattttcaaatactttatcacagttgaggagtatgaggcaagcaatgcagatatctcattttacagataagaaaactgagttgtagagaaagagagagagctaccaaaatggttgtactgcacactaaacccaagcccagactattatatttttagaattacaagggtgatactttgagctgaaatatgtcaaactggcatgcctatgcaattttccatatacttcagatatttatttcatatagaggcagggtctcactctgttgcccaagcttgagtacagtggtgcagtcattgctttctgcagcctcaaactcctgggctcaagtgatcctcccacctcagcctccatagtagttaggaatacaagcatgcaccatgcccggctaattttttaatttttgtagagatgaggtctctctctgttgccaaggctcatctccaactcctggcctcaagcaatcctcctgcctcagcctcccaaagtgctgagattacaaggcatgagccaccatacctggcagagatattctttttaaaaataaaaaaaaaactcacaatttagaaattctttctttcaaatgtatctgattaagaattatgaagaaaacattctaaaatcaatattttaaaactagtttgcatcataaactagaagagaatggaaacttgtgtcaaacgatagccagtccatgaacgtttttgctgtgatttttagaagacgtatctgcataccaccagcttccatacagagctctttgatggtaggtggtggcaaagaaaacaggctttatagaagtttctacacaacagtgtgagaggcttccatgaatggaaagcctcttagttcaagctgtcttagttcctgaggaaacgtgtctggctattgcaaaagattttgttgaacaagggcacaaatcaaggtgaagttcttctcctttccttgaagcagagatgactacaaatagaacacagtaataataggcaggcaggactattatattcttttaaaaattgggcacagcaagaagttgatagctcctaggtaaatgtgacaggaattgaaagcacaatagaatctaaatccatccaactgccaaacagtaatatcctgacaaaattagggtttttttttacgaaagaatgcatttccccaccatcttctctaccctcctagttttccttctatggagagttccactaacaacatcttaattgattacgactgattggaattttagtcactccaaagactacacttggccccgcccccaagggccattttaaagcgatgtatttcagcactatgtggtgttcatgcagatagcaagttgttaatagaatctaggaagatgttctttggcagaaaatgatttcatagacatttttcattatgatagatgtggtattacagctgttatataaaatttcaagctgtgttgcagctttgtcactagtgttataaatcactcactcgtatattaaagtctgtggaaagcaactggaggggaaaaaaactctcatcttctatttacagactaggtataatttggcattattcttaaaggttcaaggcagcttagagaatctgtattcagtgcttatgtgaggatcaggagatcacattccattactgctgagttgggaaggaaccatccacacagtgagttaacattttctgccataaatgtgaaggtaaagtaagttcatgcttccaagagactggggacagagaactccattgccatttgcaagataagctaggaagagaattaattaaaattaataaattatatacattagaagcagttttgtgccagtaatacaatttattttatacaatggaagtatgtgtacatattggtctttctgtctttgtaggcaatcaaaatatgtaactctatactataataccagttgagcaaagaaggtcctaatttgaagtattccaaatttaagtatgccctctctctctctctctctctctaaaccatattagattttgagtaatttaaacagagtatgggagaaaaaaacagagaggcaaagactgatcacagaagtacacttgctcatttttctgtatagtgtacaccgcttttagccctcctcacataggtgagattccttttgatcacagtggtctgaaacccaattgctaattggtggaggtagagtggggatatggaccgaggggatttccccatcatctacagctaaacctctaagccagtggtcctcaacagggaggttattttgcctgccaggggccattgccaatgtctggagacatttttcattgtcagaattagaaagggttccaccagcatctgacgagtaaaggccatggattctggtaaacatcctacaatgcacagaatagcccccacaacaaagcattatctggcccgcaatgtcacagtgctgaggttgagaaactggtctagggttaaccaggcaaaccctccagtcaagagggttgtgatgatctgatcttttttgattggtcttttaaggaaagtaactgtgagcccagggtggattctgattccaacttcattttcattattgggacatggttctactatttacagagatgcaagaatgttatatttctaaacaaaagaggctttcacccgaggaattggggcattcattttcttcagtgcagacctttgaatgtcctgtaggaaacaaaatggagcacaacagcagttatgctctgtttgaagaacgcactttccactcctgagaagaaaaactatcataggatggtgcaagggttcaggccagtctgtaaatgtcccagaaaattctctgtaactgtgttactaacacaattactgaaggggaaagaatggaaagagaatacaaagaagggagggatggaggccattacacactaaaattttgtcccagttaattcttaaaatcctgtaattgggttgtgttttgtataatttgtaccaaggaaaacatgaagttcaaagctattgggtaacttggcccaagtcccatccctagtaaataaaagagctggaatttggacccagtctgtctgaatataaattcctttttttttagctttgtcacaccataagatgccacattagagaatcattcctatgcttaactcattcttgatcacaggagccagtgtgggaaagtggtgacagactgggcttactgctttgaaataacaaatttggtaaaagtcaaacgtggttatgaaatccaaagagactcgttgattaatgagcaaatcttcatcaattctagattgcacgtgaatagaagcacacaaatacacacaggcaaacactacgatgggagcacaaagccaatgaaagaaaagctgctctccgactcctctcaagtatcttctctgccagtgtttccctagaacacggaggtttgatttgcattatgttaaggaaatttttttgtgatttcactccccaaaaagtgttctctgattatttaagacttactactctgctttctagaaagatttaaaacacatgcaatttgaacttcccctatgtcgttacaatcaggccacaaagaatttcccattttgtattttaaaccattagattaatagtttttgatctcaaatatgcaccacatctgagaaagtatgtcatgcctccttggaaataataattttcaggggctcctcacatcattcaaaagaccaaagcctattattcaaagtccaccactattcgatctcaaaccacactccccaacctttctctccacaaccaaattactaacttgtttctcaaagccatcccacatattctcacctcttcatctgactctctccatttatcctgcctagtgggcctcccctttccctcctccatcctccagactcagcatgtatctgaagcccatcattccacgggagctcaccccagtgaatccaatagacactgaacataagtttggcccattcattgagcaactattaattcaacaagtacttactaagtctctctatgatagtcagtgatctgtttgcacacataagcttgtctgctccactagactataagctctttgaaaataaaggtatgccttatttacctcattaactccagaataacaccaggtcaggcacccagcacactttcaataatgttcacaacacagtaatattgcagacatgattactttgctctctacaactataagacactggaactcatccaaatgcccaaccactgaagaatggtaaagtagattaagatacatcaagaagcagaaaattaggaagtatgtaagcaatcattacaaacactatggctccttctcctcttgcaaatcatccacaccaattcccattctcttcactctggaaaaactgacttctcttaactcacatcctcactatacccaggacagactttttataagaacattcacagcatgctagaattacattcttatggggagaagtatagatttggacgagataccttcattagccacttgaataaacgatgaaccccaaagagcattctaggttattaagaaaagactgtgaaaccaccttctaaggaaaatcggagactttgggtttgtagaaatatgggcattcaagtttggtagtaaagctgaactgctcagataacagaaaaaaaagaccaaatgctctgtaaaggaagcatgaaggagaaagaaagaaaaatgccagtaaggatataggagagagaaattatggaactcaatgagatgtagtgaaggttttgaggaatttattatcaggcatgtgatggaaggctagctctccattggtctcttctgtttctgcactgacctttgtctcagactgtctttccaaggacacttgtatagcaaagagctttggaagttagaggcagtgtctccttccagagcaaatggcagatttgttcatttctaatataaaaaagacaatgtttaccccaaggcaaatatctggcaggcttattgcccattagaaaatattcaagtttcagctgagcatggtgttttgggcctataatcccagctactcaggaggttgaagcaagaggatcacttgagagactaggacttcgaaactagcctgggcaacacagggaaacctctctcttaaaaactaaaaaaaaaaaaaaaaaaaaaaaaaaaagccaggcatggtggcatggtgaagcctgtagtcccagctactaggcaggctgatgtggaaggattacttcaacgctatagtgaactatgatcacaccactgcctcctgcctgggtgacttcatctctaaaaaaattaaaaaactaaattctaaaaaattcaagtttcctaaatttggtattcttctcttgtaaccaatgtgctgcatgtgcagatgttatctggctctctttgtgtcaccctgtgggatttggctcaggcaacaaaaaaagatgctgatactctgacaattattattgctatgaataacaaaatgccttttgtctctgacccaggagtttcatgtcttctgctagcatccacgaaactgtggcaggccacacaaaagtataatgagatccaaagatcttgaaagtgtgttgacgtaaacactttcttaaatctagcctatgaaatcttaagtaagttttgcattgtttaccaatgtttctgttgtagatggcttgttttgggagaatgcagagtttctagagtcagtgtctagattgatacattaaaaaatcagagaaatcaccatgtggacagtggaagtagaccttgaggatacacttaaatagttgagagatctttcctattctgagcttcgtgaaggaagagatcatattctgtctactttacagcccctgtgttagccgagtgcctgacttgaagtaacatcacacccagtaaaggctggatgattgaatgactgaatggcatagggcaccatgcttataatgcacccttgatagtcaacacccaaactgttccttttaaaatatgaacctggccatttcacttctcttccctcaactcttagacgactttctgtcatgcttaggatacaagcaaaagctcttcttaaggcctccaaggacccatataatctgagccttgactctattcttctcccacttatgtccttgctccctgcttgccatattcttcccttagacattcagatgtctcactccatttgatatggtttggatctggatccccacccaaacctcatgccaaattttaatccccagtgttggagatgggacctggtgggaggtgactggatcatggagacaggtttctcttgaatggtttagcaccatccctttggtgttgttctcatgacagtgagtaaattctcacgaaatctggttgttaaaaagtgtgtgtcacctctcccccatctctcttcctcctgctcctgccatgtaagacgtgctgcttccccttcatcttccaccatgattgtaagtttcctgaggcctccttagaagcagaagccaccatgcttcctgtacaacctgggaaactgaatcaattaaaccttttctttaaaaattacccagtctcaggtatttctttttagcagtgcaagaatggactaatacaccattgtatccaaatttcacctcatcagagatgctttctgcaaacaccaatctaaaagagcacctcgtccctctcccactttatcatactttttttttaattcactcttcatagtacctgccattctattatgtattgatttgtttgtttgcttattatctgtctccctaaccagactgtcagctccaccagggcagggactttgtttcattcactaactatatcccagcatttaaagagttcttgggatgtagtaggagcttaataattaagtgtgcaatgaatggattagagaagaggaggagaaggaaggaaagggaatgaaggagatggggaagagaggggaagaagggagtgaaaaaaaagagagaaaaggatgaaagaaagaagaaaaaaggcagccaccataataagaagcatcactaattgatgctgctgagctgcaagggtctcagagagggtctcagggtctgtatcctcttctattgtaatgggatatccttttctggcttccaaaaacagccctttccctctaatagctgttatgtcagaaatggaaacaaagatagtgtctctgattaagtgatgcattctgggaaaccggtacaacttcctggtacagaggcaggaaattttacctcaacctgcaaggaaaagctaatcggagtcctttggctttctctttcccagcttctcatttaagtaagtagttactgatggctacaagatattctaataccactgcaaatgcctggctgggttttagctgttttcacacttgaattttctgctttaataactggaacatagaaatcttagttaagttcggtcataagccttgaataaaatgaatcatttaatcatgaagaaaattccccagttgaaataaacaagcagattttaaacaattctatatatctagggtttcacaatattctcaaaggagacatgtataaaaattataaatatctaaaataatcctgtatcttagagagcttagacagcctcagctccagtgaatgaatgtaaagtacaaagtaaatgaggcttaattgcattagaacacctgcataattgatcatttcaccacaactgcagtctaaaatcatgatgtctgaggtgatcaaactgcactgtgggaagtaaatagtaaagccttttcaggtcagatccagcccctcaaatctttctgttgattttatttgtttggcttttggttgattggttgctctgtctgttgggtttctgcctccttcttgttcctgagaccatttataatgaatttgcatgtaatggagtttcaaggaagtttgaagatatctaggtgcttctgcttggtggtaatagaagatgaggggatattacaacacaaccagaggactctaactcaggtcctgtgtgataaaaataaacaagcctacactagggcagattttgaatccgagaggagaggggactgtgtttcaaacccaccctatttaagttccattctacttaggttcccctcggctttaaaagctgtaaggcagagatcaaaacccttttgtaaactgcctctaagtaacgcagcaaatggcttcttgcagctaaggctggatcattacagtacaaagcagcagtattaaagtaggagactctttatttcaggggaaaggctcatttcctgcaaaaaaaatttttacaatttgcattgggctctttaatagtatctaactgatagatttcaattatacaggaacaaaaagtaagtgtggccactgcttacaggctggagatcagtcatgtatcctggaaatcttatcattagagggggaatccaacctttggccccagtgaagaattttactcatctacctagaagatgactgaaaagaaacccggagtgtaatgagagaattagtgccgcagccagtgcacacagaatgattttaaataaagtatgaattattctcagctgttgagactttattcataggaaagagaaagccagacacagcaaagaagaataaaaaacacggcctgaagatcccatgttctctcaaaaccctaacccttctattctgagtattcatcaatatttaatttcctcatttattttatctttccatttccacaaccctgtgttctgttcagctgaatggtgctgtgtgtctagacaccagtgaaaattggtagcctcacatgaatggtgacccattactctgttgagttcactaagtacacgttgagtgcctattgtgtgcgaggctctgaaatatgaagacaggaagagacaactccaaactattactagaaattcatccctggagccagacagcaaaggtctcatttggccactcactactctgtgacatcacttaactttcctcatttgcaaaatgtggataacaatactacccatcacagcgttggacaaatattatatgttaatatttgtaaaatacttagaatagtggcagtgtcatatcatgttagctttactattactttgtaggaggcttcagactaggaaaagaaacaaaaacaataattccaaccttaaaggataaatgctgtgatattgattagcactagagctttgagagtacagaggaaggcctaaatgggaaggaggggagttggactgaaataaggaaagattttcaataagagatgaaacctaactaaaatgtttttgaaagaaaacaaaaacctaaccagtagcctataccagctgtacaaatttccacttctgccttaagaagcgggcttttctctacagctcattccttttcccaaaactaaagcttagaatcatatttacatagggaaattcttcctgctccagcttcgcccaagagtatactctttctgcaggcctctgcacttctggtaggtatcacctacttccagtaattaagaacatggaaacggatgcaagattgctgtgggtcaaattccagttttgccactcctggctctgaaaccttagacaagttacttaaccttatgatgattcaatttcgtcagaggtaaaatggggaccataatagtgcctacctctgggtggttatgaggattaaataaattaatagttgtgaagcatttagaacaatgcctggcatattataagtactatgtggatggagatgatgatcattgacacttttttaaaaacaacaattttcccaagatcagaagtggcagtcttggtctgtagaatcctgttgaccaactcaagtctttttgttttcaacagctttaggagttacatttgacataaatacattgcagacattcagtgtataaaatttgataactttttcccagccactcaggaggctgaggcaggagaatggcgtgaacccgggaggcggagcttgcagtgagccgagatcgcaccactgcactccagcctgggaaacacagtgagactccatctcaaaaaaaaaaaaaaaaaaaaaaaaaaaaaaaatgataacttttgaaacgtgtatacctgtaaaaaaaaaaaaaaaaataccatcaccataattaagataaatttcctttgtaatccctaccacggtcacctccttccctatctcatccttgtgcaaccgttaatctgcattgtcattatagattagtttgcattttacagaattttatataaatggaaccatccaatgtgtactcttttttggtctggcttttttcatgcagcataaccattttgagattcatccaggttgtagcaggtatcagtggttcattctttgtcattgaggagtagcagtatgtgaataaaacatagattgtttatccattcacctgatgactggcttttgggttgtttcagtttggggctattaaaaataagctgctatgaacattcatatgtgcatctttgtatgaatacatgctcttatttaccttgggcacatggctaaatatggttcctgtaggtttaacttttgagaaactcccaaactgctttccacatggttgtaccattttaccctcccttcaataatgtgtgtttcttcccagtttctccacatcctcaccaatccttggcttggtcagtctttttgattttgcccattctactaggtatgcagtggtatctcaatataattttaattttaattcccctaacaaataatgatgctgagcatcttttcagatgcttatttgtcatatatattttttatctgatgaagcctcttttcaaatcttttgcctatttttagttgggttgcttgatttctcattagtgagttttgagggtttttgatataatctggatataagttctttatcagatatacgatatgcaaatattttcttcgagtgtgcttcttgtctgtttattcttctacagtgtcttttaaaaaggagatatttttaattttgatgaagtttatcaatttgttttgttatggatcatgcttttgatttagtgtctaacaaatctttacccaaatcaggtctcaaagaatttctcctatggcttttttcctagactttttatggttttaggctttatatttaggtctaagattctgtttgaggtaattttttatatgattagggatatgaaccaaagttcatttctttacatgtggatagccgatggtttcagcaccatttgttgaaaagaatatcctttctatgctgaattgtcttgcacctttgtcaaaagcagttgtctatatatgtaagggtcaatttctggactctctattctgttccatttacatatttatctatcttttaagccagtaccacactgtcttgattattataggtctgtaatgagtgttaaaatcaagtaaaattcatctaccaatttttttcttctttttcaaagtagttttggctattctagatcctttgtccttccatatgaattttagaatcagcttattgatttctatccaaattcttgttggaaactgtaaaaatcctagaagaaaacctaggaaatgccattctggatatggcccttagggaagaatttatgactaagtcctcaaaagcaattgcaacaaaaacaaaaattcacaagtgggacctaatcaaactaaaggacttctgcacagcaaaagaaactgtaaacagagtaaacagacaacatacagaatgggagaaaatattcacaaactctgtatctgacaaagttctaatacccagaatctataagaaacttaaacaacagaacaagaaaaaaacagccccatgtttaaaaaatgggcaaaagtcatgaacagagacttctcaaaagaagacatacaaaaatccaacaaacatatgaagaaatttttatcatcactaatcatcatagaaatgcaaatcagaatgacaatgagataccatctcatgcccatcagaatggttatattaaaaagtcaaaaaaacaacagatgtggagaaaaggaaatgcttatacactgttggtgggaatttacatttttttagccactgtggaaagcagtttggagatttctcaaaaaactgaaaacagaactaccattcaaaacccagcaatcccatcactgggtatatatccaacagaaaacaaatccttctaccaaaaagaagcatgcacttgcatgttcattgcagcactattcacaatagcaaagtcatggaatcaaactaagtgcccatcaatggtggactggaaaaataaaatgcgctacatatacaccatgggatactatgcaatcattataaaaaaaaaagaaatcacatcctttgtagcaacatgagtgcagttggaggccattatcccaagcaaattaatgtaggaacagaaaaccaaatacaacatgttctcacttataggggagagctagacattggatactcatggacataaagatggcaacaatagacactgcggactactggtggggcagggaggagaaggaaggtgcaggggttgaaaaacttactgttgcatactatgctcagtaactggttgacaagatcattcataccccaactcagcatcacacaatatacacaggtaataaacctgcacaggtagccccagaatctaaaataaaagttgaaaaaaattctcactgggattttaattgagatcagattggatatatagatcaatttggggagaattcacatcttatacaaaagtgaatctttttttttttgtactttaagttttagggtacatgtgcacattgtgcaggttagttacatatgtatacatgtgccatgctggtgcgctgcacccactaactcgtcatctagcattaggtatatctcccaatgctatacctcccccctccccccaccccaccacagtccccagagtgtgatattccccttcctgtgtccatgtgatctcagtgttcaattcccacctatgagtgagaatatgcagtgtttggttttttgttcttgcgatagtttactgagaatgatgatttccaatttcatccatgtccctacaaaggacatgaactcatcattttttatggctgcatagtattccatggtgtatatgtgccacattttcttaatccagtctatcattgttggacatttgggttggttccaagtctttgctattgtgaataatgccgcaataaacatacgtgtgcatgtgtctttatagcagcatgatttatagtcctttgggtatatacccagtaatgggatggctgggtcaaatggtatttctagttctagatccctgaggaatggccacactgacttccacaatggttgaactagtttacagtcccaccaacagtgtaaaagtgttcctatttctccacatcctctccagcacctgttgtttcctgactttttaatgattgccattctaactggtgtgaaggcatgggcaaggacttcatgtccaaaacaccaaaagcaatggcaacaaaagacaaaattgacaaatgggatttaattaaactaaagagcttctgcacagcaaaagaaactaccatcagagtgaacaggcaacctacaaaatgggagaaaattttcacaacctactcatctgacaaagggctaatatccagaatctacaaagaactcaaacaaatttacaagaaaaaaacaaacaaccccatcaaaaagtgggcgaaggacatgaacagacacttctcaaaagaagacatttatgcagccaaaaaacacatgaaaaaatgctcatcatcactggccgtcagagaaatgcaaatcaaaaccacaatgagataccatctcacaccagttagaaaagtgaatctttcaacccatggacatctctctccatttatttagaatttagtttctctcagaaatgtgttatagttttcatacatcgtcctttatttttgtagtttcaattcataggtcctttacatttttgtcatatttattcccaagtacttcatgtttgtgatactgttgtaaattgtatttttttaattgagatttccaattgtctgtggcaaattgactttttatattaatctcaaatctgaagtacactaaatttatttacaagttcaagatgcttttttctggattctacataaataatcatgtcttctgcaaagaaaattttgcttcttcatttccaatctggaagttttttctttctttgtcttgccttattctattggctagaagctctaatacaatgtggaataaaagtggtgggagtacacatctttgctttgtttctgatcttagggaaaagcatttgatctttcaacattaagtatgatgttagctgtaggtttttgtactgtcctttattaggctgaggaagtttccttccattaatactatgagtttgctgagaggttaaatcaaaaatgaatgttgaatatttttaatgcgttttgctgcatctattgagatgctcacattttattttttattttataatatggtgaattacatcaattaagtttgagtattgaagcaacgttgcatttctgggaaaaatcccaattaatcatgatgtgtgtgtgtatgtgtgtgtatgcacatacatgtgtatatatgtgtatattagttaaatttcacttgtcaaaatcttgtttataatttttatttgtgttcatgaaatatttttatctataattttatattcttgtaatattttacttaggtttggatataggctaatattgacctcatctaacgagttgggacatagttctccctattcagttttctacaagagtttgtataaaattgtcatcattacccccttaagtgtttggtagaattcttcaacaaaaccatctggacctaaagttttctttgatggaacgtttttaaacaacaaattaaattcctttaatagatatagggatactctggttatatatttcttcatgagtaatctttggtagttgatgtctttcatggaatattgaccattttatctaagttgttgagcttatttacataaagttgtttataatattcccttattaaccttttaaaattgtattatctacattaatgtcacctctcacatctgatattggtaatttgtgtcttctatctttattttctagtcagcctcactagacacatatcaattttttaatcttctcaaaaagacaccttttagttttattttttctatttattttctgctttctattttattgatttctgttctaatgttttttctacttatcttgagtttaatttgggttttttccctagtttcttaacctggaagctgtgatctttgattcaagacctttcttctcttctaatatcagcatttagtactataaaattcaccgtaagtattatttagcagtatattgtaaattcaatgtgttgcgttttattttatttagttcaaaatgctttctagttttcatttgttttcttctttgacccatgggttgtctaaaagtgtgttaccttgtttggagattttccagaaatctgttattgatttataaattactttcatatttttgcatgatttaaatcttttgtaaatttattaaatcttgccttgtagtccagaatacagtctatcttgataaatgttcaatgtatattctacctccactcagtggagcattttataaaacttaattaggtcaagtgggttgatagtgttgttcagatatttatattcttattgattttctgtctacttagtctacaaattactgagaaatagttatttaatatatttgactatagttgcagatgtgtacatttttaataatgttatcagttattgcccaggtattttgaagttctgttattaagggcataaaccctcaggactgttatattctcttgaagaattgactccattatgactatgaaattacaacctttctgtctagtaatattctttgacctgagatttacctttcttcattaatataactgttctagctttctttcgactggtgttagtatagtacagtctgttcttatcatttgtggtagctgtgttttataaagtcactgtgaacactgaagtagcaaatattgaaccattgcacctaaaagaaatatgtatatacatatctcatataaattataatcttaaatcctaaaagtagttcatcatgatgtattctatttgcttgatatttaaaaagagaaaataaggttcaaaagtgttaagtgacttaactgaggttgtctcactaacaagtgacagttaggattcaaattttattcaactgacccaagagtgttcttgcactacactgtactatcccctactttctttatcctctggttatctctttttaaaagctaaaacaagaatacaaagtattgccttatttgttctcagccagtagtcgggggttaggtgactcaaattttttgctattctgtgcatctccacagatggccacaaaagcaccaagagtattgattttgaagttacaagtaaatcttaccaagtaagctaattcacaaatatggaatcctcaaatcatgagaattgtgtatctttttccatccctttacatttaacctgtttgtatctttatattaaaagtgcaattctgtaggcagaatgtaattgggcattgcttttttatccaatctgataacctctgttttttaattgggatatttagaccatttgtatttaatgtgataatttatattgctaaatttaaatctacctttctatgtgctttctagttgtcccacatattacttgggtttttttctctttttatgcctttttaggttaattgaatactttatatcatttatctcttttatcattttattaggtataattctttgttttgttattttggtggttattgtagggtttatagtatacattttctcacagtctaccttcaaatggtattatagcatgttacatacagtataaaaactttgcaatagtataattctattcttcccctcccaacctttgcattatcattacacatttaatcatgcatatgacataaaacacacactgcattgttactatttttgtataaagagtcaattgtcttttaagacatttaaataattttttaaaactctatgtatttgctcatatagttaccatttctggtgctcttcattcttctgtgtgcattcctatttccaactgctattatattccttttgcttaaagaatttccttttacatttttagtagtctgctggtaacaaattctctcagcttttgcatgtctaaaaacatctttattttgccctttttttgaaatatatttcctctaggtatagtattctggattgacactttccctcttcaggactttaataatgtttctgcactgccttgtcacttgtattgttcagcaggaaatctgctgtcatccctatacttgttcctctctacattatgctctttttctctgctgtttttaaggtttctttaacaatagttttcagcaatttgatgatgatataacttggtgtagttttctttaagttgcttgtgtttggagtttgttgaaatgattagatttgtgaatttatagtttttagccattttcattcatcattacttccaatactttttctgtccatctctgtcttcctctaggactccaattgcatatatatgaggccatgtgaagttgttccatggttcatttatgctttgtttattttttaaattctcttttctctttgtatttcatcttgtataatttctacttttatgtcttccagattactaaattcaacttacacagtataattatacagctaaaaaatatattttggatgttttaaaaaatatcttccatgcctctacttaactttttgaatatatacattacagttataataactattttaatatacctttatctaataattctaattctgataattctatgtcagttctggatccattttgattgattaaattttattctgggttataggggttttttgcttctttgcatgcttggcaatttttattagatgcaaatattatgaattttctattgtggaatgctggctattcttctattctttctgatattctcaagctttgtcctgagatgcagttagttacttggaaacagtttgatcctttcatgtctagattttaagatttgttaaatgagatgtaagcaatgctcagtcttgagatgattattccccactattgaagcaagacccttctgtgtactctaccgatgttcattaaatcatggggttttcccatctcactggtgggagcaagcaccatctctggccctatataaatgtcaggtcctgttatctctcaccttttttttttttttttgtggtcttttccatgaccttgggtagtttagtcatatgcatgtgctgatcagtattcagctgaatactcaaaagcgaccctctgcagatctctgcagttcttctctatgcagtgctctcccacttcttacaaattctcctaccctgatttctctaaactttcatttccatctcctcaactcaaggagttcactgggctccacccgaggttccttttttgtgccacaatctggaaactctctcaggtttgcaggtttctgaagcaaacgtagggctcacggtttttgtttcccatctgtcagggatcactgtccttcgtggtctgatgtccagtgtcttgaaaacctattgttttatatattttgtttcctttttgcttatttcgggcaggaagaaaaatccttcatcttagttggaagtagaagtccttgtctcaactttacctattctactcatttctaataagggcccctgattggttttcccaacaactgaactctatgctttgatcactcaccttctagcacattctgcctctctgatttgactcaaagaaatactataatcttgggatcaggaatacctaggttcacttgcttgctgttgcactaactctattagtttactttcccatctgtaaattgaagtaacaaaacctaccttatgagattgttgtaaagtaacttctccagtgactggtaaacaacagggactcaacgaatggtggttgtcattacaattactaggcttcttgttctagcttattctctcttcctcctctccttccctgcctccatcttccttactccggatctgctcagccctaatatttcttgactgtgggctgcagtgacaaattatgctttaagttatgtctcgggcctcatgacagctgagtcatgccatcaagagcctgtagagtgggaatgagtcccagccctgaaatatcagcatgtgtgggtggtttctgcaggaatcactgacgagcacctgttaaatattttactttttcttagacaagcttcagtcacttacttttaggaagtcttaaagtctccctacacttaacaaaagaccacatagaacttagccaccacctagcattgttcagattgcttcttgcacaactgcagggactcctattactctatagacactgtacatttgtacagttacaagttttcaacagacaacaacaaagtatattgagaaggggacaccagttgaaattttcattagacttttagctgcagagaagtttaaagtggttgatatgtcaactgagtattccagttattccataatagaatagagtcatctccctactaaaagccatcctgtctgtcccttttgggaatttttttcagctctgggaactatcccatggatctaaaagcagcataagccacatactacagtggctgagaatatgggcattcatttcagccaaaatgtgttgtaaccccagttcccccatttattagcagtactaccttgggtaacttactcaaccctctgagaattctctttgtagaatgagagtaaatctacctgtttaaatggggttttgatgaggttggcataagataatatatgtaaagtgcatatattacatgcctagtaaatgataaataatatcagtatcatgaattaccattacataccatcatcagtattgttgttattggcaataatgcatctaaccattaaaaatcctctagtacaacactgtcaatttttgacaaagatagaaagttctttatatttgctgtctaatatggtatctactagctacgtgtagatattgagtacttaatgctggatagcaaagctacaacaaggattacttattgggaaatctctcaaaaattttgctcgccatgaagtgaagaaactcccaagatcaagtctgcgaaggcagcatcttcaccaggagaattaatgaatgatccttggtcctaaacagatgatctgtcccaagatactgcttggcccatttactcacctcatttaaaccctactcgctggctcctctgaagagggcctttccctgaccaccaaccatcccacccctctctgtcacttgcctctacacactgtatttcttggcctctctgatgctgtatctttattagtggctttgttcaaatctgtgccctgctactcgcatgcaaactccatgaaggtacgtttcttatctgctttgatcaccggttgatctcagtaccaagaatgtgcatattgtagggtttcagtaagtatttgttgaacttaattaaacaggttatctgaaagaaggccagaggctgatcttttataagaagcagaatacttttgtaaaattaaacactcccctcttccagtctccaacccccaagccctacatgttcagacaagggcctgggattctctggagaccaccagtaccagctctgtaactcccaacccacaggtctcaggcgaggcacttcattgccagtgtggagaaagtgttttatattctaaacaagacccaacatttaacaacctcctgttcttctctctcaatagcttactctccttccagcaaatgtgattaagcattcacggccatgggtgtacatttttattagggctatgacaagtgattcagaggtaattaagcaatggaatgtttcacacaatgcccacttcacttaaggaataaactctacacgttgttggattaactggaaaaaaaggaaaaagaaactattcagaaagcatcaacttctataaggaactattggccctattttgggggttttcataagaaagtgaaatttttcatttatatagaagcatgaggaagaatttaaaagtccatgtaaacacacacacacacacacacacacacaccagtcatttattgcagcctgtttttttttctctttctgcaaagaatcaccatcttaagtgtacaaccatagaaaaatgagtaaataaattggagaatatatggaattttatgtagcattgaaaagaatgaggtagaatgatatacgcttagatgggaagatgctatattaatatgacaaaaaagttgtagtataattattttaaaaataaatgtcattagtatatgtttatatgtgcattgaaaaattctttaaggacatgtcaaactgttacaagtggcacctaggaagtggatttgggcctgaaattacaacaggcttgtattatttttgcaattataaaatatatttaaacattttaatttttttaaatgagctaaaaatttttttaaagagtcaaaaaattacaggaatagcctgatagttgcaagggagcaggatggcactgacaaggtatttcctcttcacccttcctatcctcaagccccatcacacacacatgcatgcacacaccccatttcatgaggtgttgaaggaactagtgacactcagaaaaactgttactcaatgttcttaaagaagcccatgtcttgcagaataagattccaattatgcaacttagaatcactgactatttttaattgaattgaccaatttccatagtcaattacacaaactagtcgttttgatattacaacttcactgtgaaggtctcgtgactatttcactcttgacccaggtagttgcccagagagctccctacagatctccctgtctaagcctcatccagaaggaaagcttaccagggtaaggcttgagaccatgattctactcaaaaggtaaattggttagcatcatcttttgagctcaagaaaccccaagataacactgacaaccacgatgaatttcttctaagccaaggtgcaaagtgagatggcacaatgtgaagcgacccttgtgaaagaataatagccacaacaaaaataaccagaagatattgaacagaaagtgtacatctttcttatgtcatcttttgagttcagattcccttttattttcctctctgaacagtaaaaggtatacgctatcaaaacagggatgagaaattttaagagactgagatttttagcagatgatatgactacatctcagggtatctgaacaacccatatctccttcaggcagagggctgtcctggtcacagactctgctttgctggatgtctacatttctctctgcatgactcattccctcacctacctccatcaggaccagtgtgactcatccataggctggctctgcctatgactgacgtggcccagcttgagatggtgagctgggtttagtgcattgggaataagggttgatcattagcagcttcagaagcagaaagcctggtttagaaaagatggggcaatcattactggacaggaacaagctgaagcaaaggaagctgtccataaggaacaagaacaattggagcaaatgcaaagggaaaaagcaggaaccttgtgactattcagccatggagaggcaggaagaataaccacatctcctgaaactctgcagtcactgtatgggatgctcatgagtcatgaacttacaacaagctactcatttcttgagctggcttgagtacttctctgttcctctttaatttattcaacaaatatttattgagtgacagctatgcagcagacactgtgctgagagatgagagtacaagaatgtataagaaccctaccttcagggagcttcctgcatagtgggagaaagacaataatccaatgatcatataagtcatcagaaatatccaggctgtaattagaagtacacatactaggagaaaataataaaggtatgtaagctactcagaaaattcaggaactcatgcctgaggatgtggcatttgagataagatcttaaggataaacaggagatgaaaaagcaaagagcagagaagggaaaggcattccaggaagagaaaactagatgacatgtttggttcagagagaagcagggcatggttactaaaatccccacccactcagggtccaaggccctgcattcaaattctgacatgatcatgtactgtgactttgaacaagtaacttctgtgattctcagtttcttcatacaaaaactggagatgataataatagtgcttaccttacagatttgttgtaaggattaaataaaatcatgaatgtaaaaagcttgcacagtaccatcatttttagttggtgtataataatgcactgtacagatgggccataattaattttaccagtcacctactgattggtctttaggttgtttctggtattttattatcatacatggtgcagcaatgaacaatcctttgatctgaggttaatacaagcctttgatctgaggtctcctcaactttatgggtccccaggtctgtcatccttagccctggatgttccctggaaatcaaaacacacagaattaggaccccaccctaagcctcctaaaacaggatttggccacatatcccaatatttgtagtgttaaaaagctccccagaaagctagacgatagccaaagagaaaactaaatctaagatctaccatattatatacatttaagtgtcaggaacatttttataatgccccctgtaaacacacacagacacacacactgtattagtctgttatcacactgctaataaagacatacatgagactgagtaatttataaagaaaaagaggtttaatgaactcacagttccacattgctggggaggcctcacaatcatggcagaaggcaaaggagaagcaaaggcttgtcttacatggtggcaggcaagagagcttgtggaagggaactcccatttataaaaccatcagatttcgtgagacttatacactatcacaagaacagtatggggaaaccacccccatgattcaattatctccacctggccgtatccttgacatgtggggattattacaatacagggtgagatttgggtggggacacagccaaaccatatcactccactcctggcccctcccaaatctcatgtcctcacatttcaaaaccaatcataccttcccaacagtcccccaaagtcttaaatgatttcagcattaactcaaagtccacagtccaaagtctcatctgagacaaggcaagtcccttctgcctgtaaaatcaaaagcaagttagttacatcctagacagaatggggtacaggcactgggaaaatacactcactccaaatgggagaaattggtcaaaatgaaggggctacaggcctcaagcaagtccaaaatccagtgaggcagtcaaaccataaaggtccaaatgatctcctttatctgcatgtctcacatccagggcatgctgatgcaaaaggtaggctcccatggcctttggcagctccaaccctgtggcttttcggggtacagcccctctcctggctgctgtcatgggctggcattgagtgtctgcagcttttccaggtgcacagggcaagctgtcagtgggtctaccattctggggtctggaggacagtgaccctcttctcacagctccactaggcagtgtcccagtggagactctgtgtggggggtccaaccctacctttcccttctgcactgccctagcaaaggtttgccatgagggctccacccctgcagcaaatttctgcctggacatccaggcatttccatacgtcctctcaaatctaggtggaggttcccaaacatcagttctttacttctatgcacccacaggttcaaaaccgcgtggaagctgccaaggcttggagcttgtaccccgtgaagcaatggcctaagctgcacatcaaccccttttagccacagctgggatgcagggcaccaagtcccaagactgcacaaagcagcatggccttgggcctggcccatgaaaccatgtttccctcctaggtctcctggcttgcgatgggaggggctgccatgaagacctctgacatgtcctggagacattttcttcattgtcttggcaattaacatttggctccccattactaaggctaatttctgcagccagcttgaatttctccccagaaaatgggttttcttttctactgcatcattaggctgcaaattttctgaacttttatgctctgcttcccttttaaacattccaattccaaaactacataaaactgaatgctttcaacagtacccaagtcacctcttgaatgctttgctgctcagaaatttcttctgccagatatcctaaatcatctgtctcaggttcaaagttccacaaatctctagggcaaaatgccgccagtctctttgctaaaacataacaagagtcacctttgctccagttcccaagaagctcctcatctccatccaagaccacctcagctcagactttattgttcatatcactatcagcatttttatcaaagccattcaacaagtctctgggaagttccaaacttgcccacatcttcctgtcttcttctgagcccttcaaactgttccaacctctatctgttacccagttccaaagttgcttccacattttcaggtatctttactgcagcaccccactctattggtaccaatttactgtattagtgtgttctcatgctgctaatagagacatacctgataccgggtaatctataaagaaaacaatttttaatggactcacagttccacatggctgggaaggcctcacaatcacggcagaaggcaaaggagaagtaaaggcacatcttacatggtggcaggcaagagagcttgtgcaggggaactcccatttgtaaaaccatcagatctcatgagagatattcactaccacgagaatagtatgggggaaccacccccatgattcagttatctccatttggttcagcccttgacacatggggactattacaattcaaggtgagatttgggtggggacacagccaaaccatatcacaccacatacacaaacacacacacacactttctaaaatacataggatactgtttttagttacatacagtaagatggacctatattggtacacagttccatgagttttaatacacatatagatttgtataatcacatgctcaatcaagatgcagaaagtttgtatccccctaagaactcccttatgctgccctttttcagttatacctagctgttgacaaccactgatctataccagttctagttattactttttccagaatgtcatataaatgaagtcataccatatatctaacctttgagacttgtttctttcattcagcacaatgcctttgaaattactcatgttcttgcatgtctcaatagtttgttcttttttattgctgagtagtattccattgcatgaatgcaccacagtttgtttatccatttattctctgaaggattttgggttcacttcccatgtgtggtgattatgaatgaagctactataaacaactatgtacaggtttttgtgtgaacatagttttaatttttccaggctaattccacccctccccaacttttgcctttctaataaataacatgtttcaatgttaatgaaataatttatattaattggattgcaggagataaccagtctgaaataggaaaaatgtaagttatgaaatacaacaaaaccacaaagggtgctgattttataataagatgccaaagcatcttattataaaattagcatcttattatgacattagtcattgtttgcatgtatctttgtaagaaaacaattatgcttgcccaaacctgtgtaaatcattcttcctcatttccatcacatccttagccaatccctctttcatacaggaagaggttttgcctcaatcttcctagtatacaaaatgccaggctgggagtgaaagctcatgcctgtaatcccaacactttgggaagctgaggcaggaggatcccctgaggccagaagtttgagactagcctgggcaacatagcaagaccctgtcactaagaaaaaaaaatttttaaatagttaaatgtgatggcatctacctgtagtcccagctactcaggaggctgaggcaggagcattgctttagcccaggagttggaggctgcagtgagctatgatcatgtggctgcattataccctgggggacaaggggagattctgtgcctataaattaattaattaattaattaattaattaacaatacaacaaaataccagagaatagtatgtcatatcccaataattgcatcatttaacctacataggctcaaacatactcagctaaggtgtgggcagaggaaataacattgcaaaccttccaggtgattctgcctgccactttcatcaatgagcatgtgatcctaagtgagagcagggtagccgtgccacccaggctgcactgtgactgccatgggccctggccactctagccttcataggccccttctttcataaaaaaaaaatattaatagttgtgttttatcattcactgatataaagacaaatatcatctaggctgggttcattattaaatatgcattgttactagaccaagcatggtggctcatgcctgcaatcccagcattttgaaaggccaaggcaggcagatcacctgaagccaggggttcaagaccagcctggtcaacatggtgaaaccttgtctctactaaaaatacaaaaattagctgggcgtggtggcacgcacctgtaatctcagctacccaggtgcctgaggcatgagaatcacttaaacctgggaggcagaggttgcagtaccctgagattgtgccattgcactccaacctgggcaacagagagagaccctgtctcaaaatagataaataaataaataaatatgcattgttactatatttacttttttcttctgattaaaaaaaaaatacacgcaaacattttcagtctcctaaaggtatcacctgccttaggcactgtgctttctatgcgtaatgcagaactcagccgtgaaccttcatctgtgttccctcagggtctttcactttgctaaaagtgattccagtgcttacatgttcctattttttcctaaaacacagttgaacacaagtcagccacttagaacctttgttgtctccaacaaatccttgctttgagccagctgccgagttaaatgctttctatgcattttctcatttactcttcgccaccactctttgaagtaagtgcaatttgtatcccatttacttctaaggaagtggagattcaggaaggccgaagtgacttacccaaggtcacacgggtgggagagggtcgagcaggaaagcacctcgtgcctgtatccatggttcaccatgatggtcaatatttaccaaacttggagtggagaaggactctctaagttggaatccaagtgtgatagtgtaagggaaatctgatagatttgactacgtaaaaattgtaaacattcgtttgtcaaaaaacacaatgatcaagattgaaaggcatttctcatctaagaaagaacttatgaggcagcactagccccttactgtgtataaatcacacatgaatcagtaatagaaaagcaaacactccattgaaaaaaaaaagacaaaggacatgaaaaagcacttcacagtaaagagtaagggaagtgcaaaactgtacacactcatgctagtaatccaagaaatgtagagcatgaagccattcatttttttaccagtggcaatgagatgttgattctctttcaatgatgtacagagattaattttatttgaaacatatcaatgacatgttcttctgttgcttttccccacctcacccccaccttccacacccattctggtaacatcacccatttgcttcgtggaagtttaggaattctacaaatgaattagaaaaaaaaaaaagacagctatctatgtttagcctctgactataagaattattttcttttttttttttttttgagactctggcctcaagaaaatggtctcaaagtttattgactcaagaagaaattgtttttgaaatttctaaagttgccataaacatatccattaaacgtgagctctgcatccaggctctaaagtggtactgaagacagaacttggcctctaacgggagacaaagccttcccctttgggagtactcagaggaggagacatgagatatagatagcctgaacttaaagcgggggttcctagggactgaaatcctaaagttggaggggggactgagaggaatgctgaaaatggataatgcttgtgcccctacatccccaattttaattcttagagaagagtgccatggaaaattgtctatcactaacattagagagctggagccagtgaaaatggaaaggcaattaagtagagagaagaccacaggaaccctcccaacacccttcagttccgatgtagcatggaaagaacccaaaagttctgcacacctggtgagtttcgtgaaggtgggagccagttgaacctacttggaaccaccatgggtggccaccaagctacctcaacatggagatcaaggcatagatgactcaggcaaggagctggattgaaaacataaccaaggtcagtgtcagagaaaaccagagcatggctgactcagcaagagaaaaccaccaagtctaaacttaactaggtaaggaagctgaccatgagtccatcagctgcagacttcagtagaagaggccagtaaatgtcccagcatctgtggacttgaggctccatgacccagtctcagctgggttatgtaatcctacccatccctcccactcattgaccaagtgccaaaaaagccacttgtgctgaagggaggagttgaaaatcagaacactgggcattgatccaaaagaggctgtgggctggatgcagtggctgacgcctgtaatcccaggacttagggaggctgaggtgggcagatcacttgaggtcaggagtttgagaccagcctggccaacagggtgaaaccccatctctactaaaaatacaaaaattatttacactacaggcatggtggtgggtgcctgtaatcccagctactcaggaggctgaggcaggagaatcacttgaacccgggaggcagaggttgcagtgagtcgagatcatgccactgtactccagcctgggtgacagagtgagactctgtctcaaaaaaaaaaaaaatagaggctctgcagatcaggaagacaacaataccagtagctggcacttattaggaagattagcttgattacactaaataaaggagctatgtattattttgtagatttatttggtcatctagtaaacattcactacatgcaagcactggatggtagagactcagtgtgaatcaaagagtctctgctttcctgggccttctattcaagtgggaagaggctaacaataaacgaataatcacattaatatgcattctgccagaaggtgatgaatactataggaataattaagtaaggtgagaatgatagaaagtgctagtttgatgaggttgtcacttttataggatggtcagagaaggtatctctgattaaatgacattatatcaaagacctgaggaagtaaaaaggtcagatgtgcagatggctagagagagaggatgccaggcagagcccacagcaagcaccaaggccctggggtgggaatgtatttgtcttgttcaagaagaagcaaggaggctgggctagtacggtaggagagatcagaaagtgagcttagaactttatcccgccttggcaacagctttggatgttcttccacatgaaatggaaagatgaaggatttgaagaggaatggcctgacctgattcacatttttacaaaatctctctagctgctgagttgagaaattgacagttggggaacagatagaagcaggatcactagttaagcagctcttgcaatacttcaagaagaagatgttgatggactctaagctccagagggcacagtgcagatgggaatcaggatggggtcagaaaagcaggtatatgggtttatatgaggatgagagccagatggtagctcttgggagcttttggcttcttgtggtgactgacaaaaccagggatgtgataggtggcagacctagtcctggtggtctcctaggaagatgagagtgggggttgcggagagtattctggaagaagacctgggtcagcaggatgccatagaaccctggcgagcctcgttctacctaatgaatgagtaggagtcagtaaagttgcaattgcaagtccattacctatgaccatggtgatacctagtgttgtctgggagaagagagatcctattgttactaactttccggaggttaatttaccaatttgtaacaaaatcctttacatgtatttgcctttcaacctaggaattccacctttatgaatgcagcataagaaatgagtgacttaatcatagcatcctgtgaaaaactagaaatggcctaaatgtccaacatcaggggtaatgctaacaataattttagtagccatgtattaagtgcttattgtgagttaggcatggggtgaaagttactacagatactagctcatgtaatccttctaataaccgtgggaagaaactagaactcagagacattgagtaacttgcccagagattcaaacccaggtctgtctcactctaaaaattttgttcaaaaccaggagatgttaaactttttctgtaaagtgtcacatggtgaatatttggactttgggggccatgaagtctctatttcaatgactcaactctgccacggtgaagcaaaaacagccataggtaatacatagatgaatggagctttatttacaagtacaggtagtgagccaaatttgggccatgcaccatggtttgccaactgctgttctaaactgcttctgtataaccaaaacttatatctgagctgtccagattctttctggaaatatttgaggaggatgtccaaaaagaagacaaagaggagattctcacaaccttcaagaagtgaaagtatactgtcaagctaaattaggcaatgccacaataacaaataaacactcaaaatcccagcagcttaacataacataagttgatttctctctcaaatgtattccaacacaggtctggaactctattgtgaaactcttctccacgtagtgactcagggacctaggatccctccaccttgtgactttaccatctcaacatatgacctccgggatagagtgattatgtgttaacaaaggccaggcattcagcctatgtcccattgcttcccacacagaaagccaatcactgagacaatgagtaatgccagggaaaaaggctttattatgggtgacatcagccaaagagatggtaggaaaacttcaaacccttctctctcccttgactaaagttaggggtttatatagcagagaaggaaaacaggagggggaaggaagtggagttggtcaacaggcagcaggtggtcaaatgaggggtctggcatctctttgtagccatgtgaaggaagaaggaattagggaggggtgagaaagaggatgtggttgacatgcagcaggtgcatctcagtgtacaaatgtaagtttctcaagcttctgtcctatgggcatccagcttgttggaaatttgggctcgtttcttatggatgtgtcacaattactcttaaacgtctcagaatggaagtgaaatatgtatcacttccactctcatttctttggctaggattcatcacatgatcctgccaaactgcaaggcaggctgggaagtttaattttcccatatgcccaagatacacctgagccaagaattctctaccacagctaatatgagtgagaatcagagaattttcatatattttgtgataagtaatctttgcttagaatgaacaaaaactgaagtcaataccattatgcaccttggctttatttaaaagctatttgtgtaacatatatttgactaatagaacatactgtacccacctaaatatataatgtatctacctggactctgcctagatccagctaaatggctcagattatcaatcaggtggtttttgtggcttttaattatcacaaaccatctgtaagaaaagccagtttcaggaggaaatagggttacttgcttttaggtctctttgatccagtaatatacggatcattttggtctgacttcctaggtgaaaacaggaggcaacagaagggagcacttctccctcttatttaatctctaaccttgaaaaaacactcaaacagacgtgagtatgtatcagagagttcccatgacaaccaattctcaccctctcctgtctttcagaacaccatgaagtcatcttctacttactcacaattggattataaactgtgtgagggcagagcctaagactaactcatgtctgcgttctaagatactggagcagtgtctggctcataaaggacatcaatgggtgtcctaaatacatgtcaattgcttgaattgaatgacagggcagattggctatggggcaggtctcagagtgtgtaggtttattcctagagcatatgggcccggaactttcttcaggaaagaaggtctgggaagtatgtgtgcagtgacatttcttgtgttcctccctaacttgaaaatccccctcttctgacaacagtgaggctctaggaccctgtccttacacttagtggacccaagcatggagcatgtgaccctggccagagccaatcagaatatccctggccagtggttcaggagtgggcacataagctaagtcagcccagcaagaatgaatcttaggacttcttcaaaaattactggaaaagacacttgctctttcctgctgaacttgaatagaaagctggagtcactggagctctcatgccactatagggaccatcggaatgaagccaacacaccaaggaaagccagaatgctgaaagacactagttactgctgaaatagcttgaagcaagtaaccagttttacccttggacttttcctattcctaggtataagtccaactagtagagccacgtctctaggaaggtcagcaagacaggagccttttttattgttattctttagcattaaataaaggctggagattggacatttcaagctccagggtctatgtttggatctttatcatcagccttgaatgcttgaaaatgataccacaatggcctaagaatatgatgatgaattgtatgtaagctgtctgcatatcagaatttataattctatctaggattcggatccaaagcaaattctcttatgttttattttcttcccatttcctcctccacatttcccagcctactagcaactagccattaaccagtcatagccagtgacatgtgggcagaagtgatgtgtgtcacttctggctgagagagcaaaaagcccaggttcaattctcctcctctctgtagcaacaggggatgccatgtattccagatggtgcagctacagctaaaaatgacagcaaagccatcagcctaagaccttgagagactctatggagcagagtcctctggcaacctgcaatgggatgtgaggtctgcatgagaaaaaaagaaccacttctattgagttaagccactgagatctggaggctgatgtttaaagaagcataactggccaatttctacaattcatggagatttgtaggtttttttttttttttttttgagacggagtctctctctgttgccgataggtttctaattgtgctttccccaataactcagaaaatattttccttcaagttttaagttataccagaagcattaaatagtgggaagagcatttccaaaggtcttgcctaggtcaatcaagacaggaggttgatctaaataattactcatatgaggaatctcaaacaacaaaagtaaagtaggtatttgtttgaggaatacataagggaaaatatcaaaataaaaccagaaatccctggcaccaacatgtaaaggttttctcttctcataagaaaaaagtgactactagacaaacatcattaaccttaagcaatataaactgcagtcattctgtctgcatatatcagctgttgtgagatcattttctctcaactcttttatatacatatgtctccacaaattgaccaaagagaaacttgtctatttttgtaaaatggaagtctcattggcatttttagttattgatgaaagtaagctttcttaatcgcttaataaatacacagaaagtgctaataattttttttgagacggagtctcactctgttgcccagcctggagtacagtggcatgatctcagctcactgcaacatctgcctcctggattcaagtgattcttctgcctcaccctcctgagtagctgggattacaggcgtgcaccacgattcctggctaatttttgtatatttagtggtgatggggtttttaccatgttgtccaggcttgtctcgaactcctggcctcaggtgttctgcccgcctcagcttccaaaagcgctgggattacaggcgtgagccaccacaaacggcacaaagtgctaattttaaacctttttttaagattttttttggtccattttcagtacatggataactgaaatctacagtgcttatatgaaaatgttctggggtccttgttaagttagtagattgctctttcttctgtatttacacattgcatatttttaattgacttcaaagctctaatcttcatgccccccaaaaaaggttattttaagtaggctttgcattgtatggcagattgaaacagggtgctaagcaaaatgtgctgtcagtaacgtattcattagaaacaaaatccttagggtagttctaatttatgaaaaacgagcacagaacaataacttaggtaataaaaatgtgttcaagagcaaaggattaaagtgagacaaaagcaaactacaacgtgctgtgatggagatgtctttcctgtctttattttaatcaatactaaaaaagaaataagctgggtagctcctaacgacttaaaaatgcaaatcctaaccaaagtcaaattcttttctcatatttcttagagcttgtagattccgagcatagtgaaccatggaagggaaagggagaaagaaccaaattatttaaactttgaaagcaatattttcatctgatttggaaagattcactaaaactttcatttttgttaaaataaactttcagagttcacacaatgactaggatctggcatttctacaaacattcccaaagagattctagcacacagtaaatgctcaatatttgatgaatgaattaatattaccatcatctgaataaagattaccaatactattttgctaggaacaacaatttttaaaaattgcctttctttagtctctgctttgtgttgttgacccccatataggtcggtctgatccaattccatcatgaccagtgtttcatctcatttgctctgaaaccaggtccatagcaggactacagggacagcaacacgctgtgggaaagtaggtgctcccagtcgcatcaagggagactgtatattcaagggatatgtacattctagtctattttgtaactcttccccttagccaggcacagccaggagggtggtgtccaggccaggaggacagcctgaggggcagcagtggcttggaaatagaggagtcctgaagcacaaacccagcactggccaagctcctgcacaccctttgttattgacagctcatgagctatcagcaaataagccattgttttgatggatttttccgtagtcccatctgccccaggaaaagtcatataagtcaccctttgccattttctggaagggtaacctggtacggcctacaaagaatgggccagaagatcacgagtgacctctccattgtagaacccaatcaaccagagagcacaggactattgggatgaggtggaccagggagcacaggaccattgagatgagacggggcagggagcacgggatcatggagacaagacggaccaaggagcacgggaccacggagacgagatggaccagggagcacagggccattgagatgagacagagcagggagcacaaggccactgagatgaaacggagcagggagcacaagaccatggagacaagatggaccagggaacacggagacgaggtggactaggtagcacctgaccatgaagacgagaaggaccaggaagcacgagaccatggagacgctagggggcagggactgcgggaccacggagaggaatccaggcagatggcaacgtgtgaatgttgttcaggcattcttttggtaggaatgaaaacacaaatgaagccatttaaaccctcccggtctcaggctgtcttgaaattaccatagaagttggattcctaggtattttattctctttgaagcaattgcgaatgggagttcactcatgatttggctctctgttttctgttgttggtgtataagaatgcttgtgatttttgtacattgattttgtatcctgagactttgctgaagttgcttatcagcttaaggagattttgggctgagacaatggggttttctagatatacaatcatgtcgtctgcaaacagggataatttgacttcctcttttcctaattgaatatctttatttccttctcctgcctaattgccctggccagaacttccaacactgtgttgaataggagtggtgagagagggcatccctgtcttgtgccagttttcaaagggaatgctttcagtttttgccaattcagtatgatattggctgtgggtttgtcatagatagctcttattattttgaaataagtcccatcaatacctaatttattgagagtttttagcatgaagggttgttgaattttgtcaaaggccttttctgcatctattgagataatcatgtggtttttgtctttggttctgtttatatgctggattacatttattgatttgcgcatattgaaccagacttgcatcccagggatgaagcccacttgatcatggtggataagcttttggatgtgctgttggattcggtttgccagtactttattgaggatttttgcatcaatgttcatcaaagatattggtctaaaattctcttttttggttgtgtctctgcccggctttggtatcagattgatgctggcctcataaaatgagttagggaggattccctctttttctattgattggaatagtttcagaaggaatggtaccagttcctccttgtacctctggtagaattcggtgtgaatccactgggtcctggactctttttggttggtaagctattgattattgccacaatttcagatcctgttattggtctattcagagattcaacttcttcctggtttagtctttggagagtgtatgtgtccagaaatttatccatttcttctagattttctagtttatttgcatagaggtgtttgtagtattctgtgatggtagtttgtatttctgtaggatcggtggtgatatcccctttatcattttttattgcatctatttgattcttctctcttttctaacttacaagggatgtgaaggacctcttcaaggagaactacaaaccactgctcaaggaaataaaagaggatacaaacaaatggaagaacattccctgctcatgggtaggaagaatcaatatcatgaaaatggccacactgcccaaggtaatttacagattcaatgccatccccatcaagctaccaatgactttcttcacacaattggaaaaaactactttaaagttcatatggaaccaaaaaagagcccgcatcgccaagtcaatcctaagccaaaagaacaaagctggaggcatcacactacctgacttcaaactatactacaagcctacagtaaccaaaacagcatggtactggtaccaaaacagagatatagatcaatggaacagaacagagccctcagaaataatgccgcatatctacaactatctgatctttgacaaacctgagaaaaacaagcaatggggaaacgattccctatttaataaacggtgctgggaaaactggctagccatctgtagaaagctgaaactggatcccttccttacaccttatgcaaaaatcaattcaagatggattaaagacttaaacgttagacctaaaaccataaaaaccctagaagaaaacctaggcattaccattcaggacataggcgtgggcaaggacttcatgtctaaaacaccaaaagcaatggcaacaaaagccaaaattgacaaatgggatctaattaaactaaagagcttctgcacagcaaaagaaactagcatcagagtgaacaggcaacctacaaaatgggagaaaattttcacaacctactcatctgacaaagggctaatatccagaatctacaatgaactcaaacaaatttacaagaaaaaaataaacaaccccatcaaaaagtggacgaaggacatggacagacacttctcaaaagaagacatttatgcagccaaaaaacacatgaaaaaatgctcaccatcactggccatcagagaaatgcaaatcaaaaccacaatgagataccatctcacaccagttagaatggcaatcattaaaaagtcaggaaacaacaggtgctggagaggatgtggagaaataggaacacttttacactgttggtgggactgtaaactagttcaaccattgtggaagtcagtgtggccattcctcagggatctagaactagaaataccatttgacccagccatcccattactgggtatatacccaaaggactataaatcatgctgctataaagacacatgcacacgtatgtttattgcggcattattcacaatagcaaagacttggaaccaacccaaatgtccaacaatgatagactggattaagaaaatgtggcacatatacaccatggaatactatgcagccataaaaaatgatgagttcatgtcctttgtagggacatggatgaaattggaaatcatcattctcagtaaactatcgcaagaacaaaaaaccaaacactgcatattctcactcataggtgggaattgaacaatgagaacacatggacataggaaggggaacatcacactctggggactgttgtggggtggggggaggggggagggatagcactgggagatatacctaatgctggatgacgagttagtgggtgcagctcaccagcatggcacatgtatacacatgtaactaacctgcacattgtgcacatgtaccctaaaacttaaagtataataataataaattaattaatttaaaaaaaagaaactagaaaaaagaaaaaagaaaaaaaaaaaaagaaattaccatagaagccaaagttgagagataccccaaggccaaccacccatagccacgtaccacgtaagcaaaacttagttatcctgatttccctgagatgctatctcaaatcacaatgaaacacaacatgtaagctttacattcttgtcaatatgattcagtgaaattaagccaaacagctatagataaatcagcttaaacaactctgcttgccttaacaagaacattaatgcataacagccaaccataaaaaaggccaaaatacttcttgatgctttataagctatgctgtaactgctataaggtgagcttcttactgtcttcatttgaagtttcctggttcaagatcggccaactgttcctttgtaaacataatatactttaaatttttaaaaatttgatctgatataattatttttctgaatttgacttgattttatttttgaaactcccaacactgctcttctgggaggaaaaaaaaaatctaatgagaaaactggagaataagaaaagtcagatcagaagttgatttttctctctttcgctttctctctaatggctcaattcccatgtttacctcatgttttggtttgcaaagtagattgttgcttctaaaaagtcttaggatgcctccaacttttggccaatggggtggctttgacttttgcaaagaatttttatccccttcttattcatttcctgcatttaatttttcttgaatgcggaaatatcggagaattttgcaattgcataactgtcctggattattttaggaatccttctcttcgctactaaaattttactctcatttactctcattttattttcagaaagagcgttgcctttcaacaaaattacaaagtaaaatgatttttgctaaacaatgcatctcgtttaacaaaagataactcccctccttcaaaaatagctgcaacatgaatatcaccaattttcatccaaaataaaattattttctcatgataatcgtcattcaggaagaaaaggtaggtgcagctatgtggccttgagcaacttttctcatttttctcagttttctcatctataaaatggggacaatgctagatgttaagcgtattataggcagtctttcgagatgtcccttttctctgacaagtagccacccacagggcaccttcttctatcagactgggcaccttttcaaatcagattgtctcaagagtttggaactggcattcagacataaccagtcatattgctgagtgtgactcaaaataaggtgatgtaaacttgcaaacttcagggacagccatcctgtgacatgtttgtaaagaaggcatgaaagctagctgggagagataaaggaatgagatgggcatgcagagaaatcagggcatggggacagagtaactaccagggttcctgatggcagtccacctcctagctctggttctgagctgtgactgcattccaacatttaactcgctgaagacattactatagcctcatttaaaaaaaaagtaaaactcctcaagcttttgttttttttttttttttttttggttttttttttttgctaaatacatcacaaatttgtttttattccttacaaccagaagtgtcttcactaaaacacaaaaggaaaaatgccaaagatatttctttatccacactggcccttctaagagaactctgctaccagccagagctcaccatagcccctcccatgcaggaattccaattaaagtaaaacaaggtctttacagtcacatgatcatcaatatgcataaaagtgacaccaaaccaacatcaaatgcccaattacccatatgtcttgctcaggtaacagtcttcatataggcaaaagttctttggtaaattatctcgtttagagaaattaaagccaactttgaacacagatgatttctcatcctcgtaacagccactcgcagaataattgaaagcgtttctcatcatctaacataccaggtcaacatggcaccatcgatccattttatttagccgggaagttcagctcggcacaagccctgatttgtgctttcatgtgactggtaagtagttcctcactcaagagaggcctcaggatgagacctctgccaatttgctctttgaaaagagtcaggcctgggtgttcactcttacaacagcctaaaatccagatgtgcacataacaatgggaagtgggataaggtcaggcccattttgtggctggctgaggggaaggggtacatctagggtatatcatgaccctgagacgtcgtagtgtggggcctttaagactagttcagagaacttcatgaatgatttccgggagtgtggaggaggccagcatgtagctgactgatgaatcattcgccaccgcacagatgttaacacaaagagttctcttcattctctgcactcatggtgttctgctgtgtgcgtccaagtcgacccatttaacaataaactagctcttagtttagagggtagaaattcatactcactctgcagctgaagggctgggcagatttaagaaggtctaattttgatgcaaatcaacctattttgctgtatttctcgctgagtttttttctctgggcccctgttaccaagggaaagttggttcaatgctgactccctctcacctcccaaacattggcaatgtttgagcctggttgagcctagggctcagaatatgagattaaatttgtgagacaagcttctttcaatctagtcagcatttatcaagtttttaggggcatctaggaagtcctaacaatgaggtctattcagggtggaggacaaaacaaaatcagactgtgtctttgtttaagtgtgcattgtcagtgtgttaacttctagtttcagctaccgcaagtaaagagttgggaagctgtcactcccatcctcacaacaagaaaaatgtagatgaactgaaaatcaatgacttttcttggacccatcaaagaagtgaagttgcaaggcaaactgtagccccaaaatccaaagaggaaaaaaaaagccactgggactataactgacaggaatacttagatggtaattttgatgaattgctgaaggctaagtagggtctagattgggagctgctatcctaggggaaccccacgattccatggactttacctccagaaaccccaccaggttttcatgaagatctaagtaagatccctagatgactctggcaggagaagaactgtaatctttgtgcaataaatccagagccttcctcaaaacaaaggcccacattttgaaattattgccccagtcaagctaattaacatacattgtgcaccctaaatatatacaattcttatttgttaattatacctcagtaaagatggaaagataaataaataaaatcctaactgagcacatagggataaaaagtgggggagcggggactcctctccaggataaatacattcccagagctttatcccggctggtaaaagggcattctcccactccagcccctccaatcctcctgcctcacctaagaggggtaaaacatagttatgaagggtcatggctgcaagaatatggactgggaacgctgcattcagggaagagagtaggggctgagtgaataaaactatggagaaacacttgtgaaggtcacagcccaggagacaggtgcactacaggactgggatttaactggtagattttagaagtttccccctcccctattacttactaccatgccaacaggactccagtgtaatgatagtgtgttacagctaaaagagctccaaaacaaggactctctctgaggagtataagcttaagaggagagaagaaaacaaggacaaatttgaagcctctggtatctacagttacagcaaacattaaacacaaaacagtcagattcttatccatattatgacaaatccacacagtaaaggcctattcacgtcagctcctaataccaagaaaagcatggtctgaagagtcaaagcgagtatcagaaccagactcagatatgacaccgatgttggaattatcagataaaaaatgttgaataactgtaactaatgtgttaaccccttattctcaaaaaaagaagacaacatgcaagaatcaaatggaaattaaaaacacagcaccagaaatgaagaaagcctttgacaagctcatcagtaaactgaacacagacaaagaaaaaaatcagcaagcttgaagataggtcaaagaaacttcccaacctgaaatgcaaagacaaaagaaaattgaagaaaaaaaaaagtagaaaacagagtaaatactgtggtacaattacaaaaggtgtaacatatttgtaattggataccaaaaggaaaagaaagagaaaaaggagcagaagaaataattgaattatggctgagaactccacaaaattaatgatagacaccaaaccacacatagaggaagcgctgaaaacaacaattggaataaataccaaaatacgcacacacatgcacacacaaatacacacacacacaggcatatcatattcaaacggcagaaaatgagaaacagagagaaatctcaaaaaagccatagagggagaaagcatctcacctatgaaggaacaaatatatgtattacagtagacttcacttcagaaaccatgcaagccagaaaagagtggaataaaatatttaaagtgttggggggtggaattctaaaattctatacccagtgaaattatctttcaaaagcaaagagaaataagctttatcaacaaataaaaattgaaagactttatcttcaacagacctgccctggaagaaatgttaaaagttcttcaggcagaaggaaaatgatacagatcggaaaactgaatccacataaagaaaggaagagcatcataaaagaaataaatgaagagaaaatttctgggtttttatgttagtcagtgctcccattgctataaagaaatacctgagactgggtaatttataaagaaaagaggtttaattgactcatggttaggcaggctgtacaggaagcatgatgctgacatctgctcaggttctcaggaggactcaggaagtttccaatcgtggtggaagcggaaggggaagcagacatgtcacgtggccagagcaggagcaagagacagaacggggaggtgctgcagttttaaatgaccagatctcacaagagctcactcactattgtgaggacagttccaagggtgatgatgctaaaccattcatgaaaaatttacccccatgatccaatcacctcccaccaggccccaccaccaacactgggattacatttcaatatgagatttgggtggggacaaatatccaaactatatcagtttccttatgtttaattcatctaacagataagcatccgtctaaagtaataatagtaacaatgtatttggtgattatagcatatgggtaagtgaaatgaattatagtaacatcacagagacaggagggaagaaatgggcaaactctgttataacgcacatgaagcatatactgttatttgaatatggatctagattagttaaaatatgtgcatatatatataattctttttttgttttttgttttttgtttttttatggagtgttgctctgctgctcaggctggagtgcagtggtgcaatctcggctcactgcaaactttgcctcccaggttcaagcaattccctgcttcagcctcccaagtagctgggattacaagcacctgccatcacgcctggctaattttttgtatttttagtagaggcagggtttcatcatctgggccaagctggtcttgaactcctgaccttgtggtctacccgcaaacattaaatctgtattgcatatcatttccacctgaatgtaagcaccatgtggcagggagctcatctcactcagctctaagtctctagtgccagacacatcacaagctgcatgaaatatatgttgggtggaatgcttgatggttgggcagatggacacttggataggtgaacaaatgaattgatgatatgtgatccatgctcccatgggaattctaacacagcaatctctaaatttttttgcagaatctaataccatatgatgttaatagctgtgccatggtgttaaaagttcttctatgctcaaaaaatcttttagagaaatgctcacttaaggaaattaaacagatttcttgactgtgagagaatggagaccatgcacttttctcttcctagaatttagcacagctgttattaggcactcagtaagataatgacacgaataaaatcatcatagagtaattcactcgtattcattcattccacaggtatgcattcagcacccaccatattacagacactgagccagggtataatgggagcaaaaatgaacagagactctgccttcatggagggtatagcatggtagaagacagacattattccaatagtttcacaaagaattgtaaaattacaatgaagggaggcaggggagggagggagagcatcaggatgaacagttaatgcatgcggggcttaatacctaggtgaggggttgataggtgcggcaaaccaccaaggcacacgtttacccatataacatatctgcgtgccctacacatgtatcccagaacttaaaataaaagaaaattgaaaaaagaagttacaattcagtactatttggagaggtaataaggcaaacagcctggtcaaggaggtcaaggtaagctaaccaagcagttgagaaccaaagcatgaggaggaattaatatggcaaaacagatggggaaactgctggaaaagtggcccagcaaagggaatagttaaaatcctatagcaggagagagcatgacacacacaacacactgaaatgaggctaacgtggctgggaggaggggttccacaggggagacaagttgagcctgagaaggtaaacgggagtcaaggtataccaggcattgaatgccaaggtaaggactttgaagcagctgggtaactatcagatttgcactttgaaaaaatcagtttggggagaaattgctgattctattagattggtgcagaagtagtgattgcggttttgctattaaaagtcatggcccaaacagcaattacttttgcacgaatctaatagaattgagatagagaagatacaagtttagtccagagcatcttgtaatacagaaagtaaggaagtgttcaacacacacacacacactcacacacagaggcagggtctgtccaagggatgcaggagccaactgaaacacctcccaatgaccagttagaacaatttcagcaacaaaataaataagcggtattaaattataaaccgaagtagaaaataaacgtccatgagtccatactgatataaacaaatgattgaataaatacataaataaacaaatgggagaatagagaaacgtgctgtgtagaattccaaataatttatggagatactttgtcttcgaggggcatagcataactccccactatttaagtgtgagatcgtagtgactttcttccaaagagcacaggatgggaaggaagaaaaaacgagtaacttcacagcggagaaacctgacaaacactacctcagccgggtgatcaagattcacatcaacagtcataaatcacatcagctggatgtaccttcgctattgtgtgatgagaacagcgctctttacctctgtgctcttcccctcaaaaactcatagccacagtctgttcatgagaaaacatcagacaaatcccaaccgagggactttctacaaaatacatgaccagtacttctggaaaatgtcaaggtcatcaaaacaaggaaagtcagagaaactaacacagctgaaaagaaccgaaagtgatgtgactacttaaatgtaacgcggtgttctggatgggattcaggaacagaaaagggaaaccaggtgacaactaaggaaacttgaataaagtgtggactttagttaataataatgtatgaataatggttcattaattgtgaaaaatgtaccatatgttaataatagagaaaactgggtatgaggtatatgggaatactttgtacacctttgcaattttcctataaatctaaaactgttctagcataaaaagctacttttctttgggaggccgaggcaggcggatcacctgaagtcaggagttcgagaccagcctggccaatatggtgaaaccccgtctccaccaaaagtacaaaaattagccaggcatagtggtgggtgcctgtaatcccagctactcgcgaggctgaggcaggagaatcacttgaacccgggaggcagaggttgtggtgagccgagatcgtgtcatcagcctgggcaacaagagcgagactccgtctcaaaaaaaaaaaaaaaagccacttttaaacaagattgttttgacaatattatccatcaagagccacataggaaggactagagtaggtggggctagtggggcggggaccagttaggaagctgttgcagttgcctaggcagaaaaagatggtggcttgggctgtggtagtggaaataaacttgggaaaaagaacactatgccattatctagaagcgtatgaagctagaagagaggaatgcctaggatcaagagttgagtaacctaaacattataaggatgcaataaatgagatgattctgcaaagaagacagagaaaaagatcctggtacccagattttggcatccaaaaaccattttccaacacaaagatccatttctcagagattttccttagaggtatgtataaggcattgaaaacagagccacacacatagcataccctccaaaaatttgattcccggaagtattatggtgagggtcatgtaacgttgcttatatgaaagggagaaatgacagattctgtatgagtttcctagggctactgcaaacagagtaccacaaactgggtggcttagaacagaagtttattctctcatagtcctggagattagaagtctgaagccaaggtgtgagcagggccatgttctccccaaaggtgttagggaagaatccttcctttttctttgagtttctggtggttgctgacaatcctgggccttcctgggctggtggccacatgaccccaatctctgcccctgtcatcacattgcctctcccctgatgtctcttctgtcccttcacgtgctattctcctctctgtgtatgtgtcccaaccgtcctcatcttataaggacgctagtctttcactaaggaccactccaatccaggacaacttcattgtaacttgattatgtctgcatgattttatttccaaataagatcacatgcacaggggccagggattagaacttggatatattgttttggggaacacaattcagtccacaacagattccatggctcgggcagggaaagatgaacctggaacatcttttggtggtagagagttaacaacatattcaaaaagcaatgcaagtatgtcagaaggacgaaggagccatttgaaggagccatttggccaatgatcaattccagaacaacttgagccaaaagataaataattatagtaatggattataaccctttataattgggttgtaatgatagtaatggattaaaacccagaataaatatccataaatccatactgatataaagaattgaagaaacaaataaatgactgaaaaatgcagccttttcttatagaagaattctagttaacaattgtagaaggaatgatggaaatagaaaatcacttggcatctcctcttagatcctctggcatataccaaataccaaattaatgattggcaaataccaaagtaatgattgttataggcatgaatcctcggaagatgctaaaattagtgggaaaattagtatgatgagaaaggatactagaaaaatctcagccaggcacagtagtgtacacttgtaatcccagcactttgggaggccaagacaggtggatcacttgagctcaaaagttcaagaccagcctgggcaacatgacgaaaccccatctctacaagaaatacaaaaaattagccaggcatggtgtcacatgcctgtagtcccagctactcaggaggctgaggtgggagggtcgcttgaacccgggagacagaggttgcagtgagccaagatagcgccactgcactccagcctgggcgacagagagaaaccctgtctcaaagaaaataaaagtctgaaaatatctccccacaagatacctattaactacaaagagaaaaaatagtaactttatagtagagacacttgtcagacaccagcttcaccaagtgaccaaagctaacatcaccagtaatgagccatatttgcttcatgtaactcttgatgtcaagcactggcaatggggcccaacagcacttctgtggcattcttattaatgcatagcctaaatctaaccataaagaaaaaaaatcaaagaaacccaaatagggggaccttctataaagtaactgaccagtactcttgacacttttgaaaatattcaacatcatgaacaacaaagactgaggaaccgttccagattggagtagactgaggagatgtgacaacaaaacacaaagcaggcttctgaattgaatcctagaacacaataaagagcattggtaggctgggtgtggtggctcacacctgtaatcccagcactttgggaggccgaggcgggtggatcacctgaggtcaggagttcgagaccagcctggccaacatggtgaaaccccaactctactaaaaatacaaaaattagccaggcatggtggtgtgtgtccataatcccagctattcaggaggctgaggcaggagaattgcttaaactcgggaggcggaggttgcagtgagccaagattgcgccattgcattccagcctgggcgacaagagtgaaactttgaaaaaaaagaaaaaagaaaaaaaaaaaggcattagtgagacagagcaaatgggcaattgttgaaaatgatctatagattagataatagtattgtatcaatgttaatttcccggtttccctaatgaccttctggttatttactatggaaaagctgggtgagggcaccgcttttgcaactcttttataaatctaagattatttcaaaaataaaaaattaagaatgaacaaaaagagtacagctttgaaagttattttagaagggaaatcaacaggacccggtaatagatgagcatcagtgagggacagagacgtcatggaagatttctctccagatttctcccttacataacaaaacgaaagtaaaattattccctgagaataaaagcactgagagggaccattttggggatgaatatcaggggtgaattggggacaagctgaaattgaagtgtctttgaaagatctaagaggaaatatcaagtagggagttggacatgagagtgatgcttagggactagggatctgtgggtgaaaaattgcaaattgtgcatattgaagccattcacacatatacaactgcctagagaaaagggtatagggccaagagtttggtttctccacatataatgacacagtaaaggagataagaagtgttcaagagtcccaagctatgcagagaaaccaaataagcttaggttaaaaatatgcccccttgattttgtaacacagaggtcactggtaactactgagaattgtttgtttgcaaagcactttcatataaacaatgtttcatgaccttcaccataatacttctgggaattgaattttcaaaaggtatcctatgtgtgtgtttctgttttcaatggctcatacagacctctaaggaaaatctgttgggttatgttacactatacgattgtcttcattttcagatgaggtcactgtcgtaggcagcatctaaggtgcccccatcaccccaacaaaagcatccatgcctttgtataagcccattccttcacttctaaccaacagaatatggcaaaggctgtcactttcatgattaggatacaaaaggttatgacttcagtcttgctagaagatcctatctattgccttcttggcttacatgctttgatgaggcaagatgtgtgtcagagaggctcacatggcaaggaactgagggctgcctctgaacaacagtatgcaacaaactgagtcctatgaacaagcatgtgaacttggagacacacccttccccagttgagtctagagatgactgcatcctagccaacaccttaactgcagcctctaagagactctgcagcaaaggacttggctgtgctatgcctggattcatgacccaaagaaactgtgagattataaataacactgtttcaagcctctgagtgttgtgctaatgtgctgcactgcctatggatgacaaatgcaagtcgttaaggctcagaaaggttaaggcttctgtgctgtatattctcccttgagccctccagattcaatctccactatctctatttgccctggaagtgaattctatgagctactcaaccagcctccttgtgctccagcttctggtttggccaatgggtggcaccaggagaaagtcagagcacagaaagaaacaggggtcagcatatctcagctctccctgctaggatgcagtttgacactgactgcatttctctacccaaggccacagctcctagaaattgatccctttcttatagcttcaggtctctctgggttccaggattctctctcattctcattctttctctctctctctctccccaaccccccgacccccacccccagcgccctggggtgcttccccagtcccagcttgtattaaaagtaatgacaaaacccacaattacttttgcaccaacttaatattccttaattctgcccacacctttataaacaattctttcctttgactctttttattcatccactttgagtgttccatctcattccagccagtgtgctaacagacacaattctgggacattaagtttcaggaccttgaaattacttattttaatgaatcaattactcctcctctcaggtagtataagcacagagactagagatgtgccctcacatggtcacagtgaacagttcaggtcaaaatggagccagaggtcagctctgctgcttacaaaccctatggaaagtgactgaatctctgtgagtctcaatttcttcatctgcaaagtggggaaaataccacacacaacataaaattgcaatgatagggctgggtacagtagctcatgcctgtaatcccaacactttgggaggccgaggcgggtgggtcatttgaggtcaggagttcgagaccagcctggccaacaaggaaaatccctttctctattaaaaataaaaaaattagccaggttggtggcacctgcttataattccagctactcgagaatctgagacatgagaatcacttgaacccagaaggcagaagttgtagtgagtcaagatcattccactgcactccagcctggacaacgcagtgagactccatatcaaaaaaaattttttttaatgcaatgataataaacttatgaaagcttacttatataagacacatggtacatagtaagggcccactaaatcatcactagtagaactccatcagcaaaatatctcattttgctaaaccaactagaatcataatgccatttgtattgtcagcagccctgggtgttacgggtaatcactagttcaataggcagacacacagaggatgccagaagcgtccacagagataccacctaacccatttttcgtgcaacaaagccctgtggagctgctgtagtgagcattcctcaccaatactgtgttcaactttttagttcaaaagaatcacttggctccttcaactgctgcagttgtccaggccctcagtggcattcagagaatggaactggtcatggagtcttgtcacatcacgttttctcctcctgaggtcacactttgcccagacaagtctttgaatgtgcaaaagcatgagggagggcaagaagaaaatgggaatctgcacatggtgacattaccagaaacgtgctttgacttcaggttgtggttcttagaaagggcaacgttgtatgccacatttatgactgctccgactatgttttaatgagtccctgcatgctgacaagagggccacttaaacaggagtaattgggtcaccatggtttccagaggacaggggacaggctgcaaggtctgaatcgctggcagaaaagcagctgatggacccaattcaaagtcactgggaggtgataatgggctcgaaacaggaccagtagccacagcctacccagacggatggcacaactcaacccagagtccagctcggcctggcagtcgccacctctactgcaatgaggcaggctggagcaagacttccccagcagcggtcctttgtgctctaacttcatgattttttttttatcactcacatcctgctcttctatgatttacttaattttctttatttatgttcactcaatatcttaatgtattttgattgcaattttatataaaaaccaccaatggaaaaccagcatcatttgccatgaatagaaagcagcaattaaaataaatacaatgaaaacaagcactgttgctagatcctggctagacattactgcctgtggaatggtctaagcctgaacttactgtcttgataaaaatggttagcaagtgtttaagcactaagctcgatgctttctcctgtaatcagaaaaactaaaagagaatggataacagagtaactttctgactgtgttattcagtctcattttatggtaaaatcaccttgtaatgcatctttaggcctcttgtcacataagccaggactacccatttggaatacagcatggtcttccccactgctgaagccaggatctaagaagtaacagccataagacatggtttgtggagctgatgcacattaaaaggaataactattgcaattgatcttttccaagtaacacctcccaccatctcatttgctccccagatgccgtcctttgggaaatggcaggatagactagatgtcaagccccactgtgaagagcacatggaatttcttatcttgttgggtagaacaagcatgtcctggtgaaagaattccatcctttctgttgctgactgggggtgccaaggaaactcttcataaccagaacaatgttggagacacgtctgccctccaaggatgctagaggttcattaagtctctactgtgtgccaggtacagttctatgtgctgaagacacagagaataaaatgggcaaattctctactctcacagtttatactgtggttgaaggagatagataggcagtaagcaaagacatgccatagcaagtggtcacggatgccatgagaaagaggacagagaatgatggtatgaaatggccacatacacaggaagcccaggagggtctgtaaatagagtggatgcttgggaaaggcctgcataaaatgaaggagcaacccaatttgtctatccggggagaaaaatatgccaaacagcagaatcaatgatggatggcaaaggccatctttatcatccatctaacttgcccaaggtcgcccagcttgtaggtgaaaagactgagacttgaacttgggtcccagacaatccaaagtccatcgagcctgacaagcacatttgaggagcagcagggaagccaatttggccagaggagagtgaaaggccaggtggtaggaggtgtgatcagcaggcagccaggagaccaggggtgaggatgttggcaatgactctgaagtagaggattagccctggacaggcttgaacagaggagccgaccttgtctacgcagtagaaacaccaccctggctgatgggcagataatggaaggtagagagccaggacagaggctggaagaccagttaggattccaccacaagagagttcagacaggacaggatggtgtcttgatgcagggaggtagcagtggaggtgatcagaagtggtctcattctgaagatatcattgacaggatttatggagggattagaaatggaatttaaaagaggcatggaatcacaggtgacttcagagttgctggtataaccaatgcaaaaatggagtttcatgtagggtgatggagtgacttgagtgaggggaactaaaaattgagtaatgggcatgttaaatagagatgcctaaaagacacacagtggagatatccactgagcagctggatattaatagcaacaataatatattcttgaaagccccccccccgaatcttggggtgcattactagtctgtcttcaggtctctcccacccatcactccctcaccttgaagttgggttagggactcctctctgtttacacagcctgcaatatttcccccataatagcctttagcacatcttattatagttgtcttttttggttcatctttccccaacattataagttctatgacaacaataaacttttgtatagccagtacacaacgtaagccaaatcagaattttagtggcttctcaacaatatctctgtcttcacaacaaccttgtgagatagataaagatctttctgtgaaagagaaaactgagtctcagagaggttaagtaacttgcccaagaccacccagcttgtaggtgaaaaggctgagacttgaacttgggtcccagatgatccaaagtccatatccttctatacccccatgacctactgtctttcctgtctactacatggagacagagtttacatgttaatagagaatttccttacagtgacacccactactatggtctgattgtttgtgtgcacccaaaatttatgtgttgaaatctgaatccccaagataatggtatgaagagatggagcctttgggagatgattaggtcatgaaggtgaagccatcataaatgggattggtgcccttagaggccctagagagctgccttgctcttccttccaccatatgaagacacagagagcgggtaccatctatgaaccccaagactgaaccctcaccagacactgaatgtgcaggcaccttgctcttgggtttccaagcctccagaactgtgagcaataaatttctgttgtctataagccacccacccagtttatggtatacttgttatagcagcctgaacagactaagacatccatgaaagagtatttctttctaccccctttactctcccagactcctttggaatgtttctttggtccaaactgcactgcattaccccaaagccataaacatgcaggaaatttaagggacaaatactcaggacataatacaatgagccagctttccctctggaacccaaggtatttttccctcaacccagaatttgagagatcgtggatggaggaatcagataatccaggtttgagcagtaagaggttccatctcttactgtgtgactttggacaagtggtttaccctctctgagcctcagtttcccctgcctgaaataagaatattaataatgttaacctcacaagtgatgaaagtttcatgaatatatataaaggaatttacagggcctggcccagagcagacactccaaaacagcagctacttttattgttaggttctttgatgggtggtggcaagatttccatgccgtattcagaatggcaaaagaaaactgctccccagagcagcttggaatcccaacagatatacctcccctgcaggatgacagtctacgcaaggtctgattaactttgccaaagatatttctaatttaaactgagttctgttggacagctcagcttgtcagaggagaagagcgcaactaccattgaccttttcaaacaaagttaattgctagggttttaaggttacagagctgaaattttgccatatattgatccagaggtgcaaatttccctcctaatttttaatttcctcttgaggagaaagtaggaatttgccttgataccttccatcttctctgagaggaacataaatattcagaaagtttccgtgaccaaatcaacagagccaattatgcagtgcaatttctcaagggaagaattcaaccaaactacttagtttttcatttatttaatattcattaagcaccgccagtggggcaggcaatgtggtaggctcagcagacacaatggtgagctaaattttacagtgggagagataaatatgaatcaaatgattagacaaacaaagtaaacgtactgtatttatattgaataagaggcatggtgggtggagcagggcagtgggagtggtcttctctgaggtgcaggcagtaagtggtgccttgtctgtaggggatttagaagtcagtcagtcttcttattgtcagaaactcaaacattattgctaatgaaattcttcttcctcctggggtagagcactttcaccaacctttctcttagattcaccatgggatgagagagaacaagagggaaatcaagattgcaaaagtaatcaggtcactcagcaagacttccaggaatatgttcagctggagcccgaatgggaaggagagcagtagttaaccaggcaaacgagggagggcagggtgtcccaaagagagagcatgtgtgagcaatggttctgtgcccatggagagcacaaggtaccagagcagggaccagacaggtgacatgcatgaaaggagtgggacaggtggggactaggaaacaagaaagtacatcccagaaaaaaaaaaaaaaggcaataactactcagctgcagctgatcccctttcaagaaaagccggaattccttatttttatgcaaaatatgcctgatttttttcatattattgacatccaatttaaaaattagaacattaaaaaaaaaacagcaaagcacatcacttggctaagttgagcttgcaacttgagctactgaagaggtgggtaacaaggaagaaggggtaagacgagaattaaccatctccatggtgagaattacatatggctccttcctcagcatccttggaacatgcatccagtcctcttctgagcctatttttattgtttggttgtttggattaggcttgaattcatctccctccccaaagacactataaactattccagagccgagatggctaccatcactttcccattcactctattgctggatatagcattgggcactcgctgggtgttcagcaagcagttctttggtagaatttatcagccagatgtcccatatcattgcatattattttccagcctctttagtgcacccagatggttcaaagctcactctgagaatactttccatttactgagcacctgccatcaacaggcaccatgctgaccacttcacgtgcatcatctcaatctatcctcccactcctctatgaggtctgaactattctactgcctatttaacaattaaagaggtaaagtttggagagattaagtaactttctgaaagtcacacagaaagtcagtagtaaagctaggaactgacctcaagtcatacatactccaaagagcaaaatgttaaccattatactccactaaggtacagccagaggaataacatcagaagttttttggtgttaaagataccagatcttgagagatcattaaaagctctacttaaaaatgcctgccatctttttggacaaactgctgtgggtacaatttgtttcgcagctttcaatggacagctattgtccacacgcacagacctgcttccccttaccttcatggatgctagcaggagagaaacttggttctgtttcctgtcatctcaccgataactaagacaaacacagacaaacataccacaaagccagaaggaaacagaatcatccaactcccttattctagctttttcatttgtaaaacgtatcatgtattctaaagcctaggaagatgtccatgatacagggttaggggaagaaagcaggttgcagaaacacatgtaacacaatcccacttaagaataacaaaaatcataatcaataatgtaagttttacttacatatatgtaatttaaatgattctgtgtgcatggggaagggtctatgaggaaattcaacaaattactaacagttcgagtggcagcctgagaaaatgtgtgcttttcagttctacattgttgaaaactttactaaaatcttatgttactgtgtatttggagataataagtctgaaagggaagtctaccctgctttgaagtttcttcaaagtacctccccttttgggcgagcctgtctgcccccagccgtttgccctgtgcagctaagcatcccacccttgctccatcacaagcaaggaatgcttcttctctcactgcagacaccggagctgaactgccatcaagccttcagtcttctaacatggatagaagatggacatgctcacacgttacattttgtcaataataatcacaacggcagcaactactgccaccatttactgagcactttctctgggacactcagctaagacttttacatattaaaccatttagttctctcacacacacacaaaactgtgaagaagcttctattatcctcttctatttggagaaaggaactgaggctcacagagactgagcaatgtgtgtaacatcacactactagatggcatatccaggattcaagtccaagcctatgcctatccatccagctaccaaccctagatatttataagaatatatctggaagaatgggtgctgctatatatcatcattatcatcatcatcatcatcatcatcatcaccaggctcaacctcatcctcgggtaaacatgcactgggtgccaggtatgtgctaaatgcattacattagaccattcagtcaataatttgctcaactccatccttctgtaagacaggcaacattacattacttactaataaagaaattggaattaagagagatcaagtcagaaagccacacatctacagccatctaatccttgacaaagtcaataaaagttagcaatggggaaaggactccctatttaataaatgacgctgggatagctggctagccatatgcagaacaataaaactggactcttacctttcaccacacacaaaaattaactcaaggtgaactaaagatttaaatgtaagacctcaaactataataattctagaagaaaacctaggaaattctggacctgggccttgggaaagactttatgactaagtcctcaaacacaactgcaacaaaaacaatttcacaagtgagacctaattaaactaaagaacttctgcacaggaaaagaaactatcaacagagtaaacagacaacctacagaataggagaaaaatgttcacaaactatgcattcaacaaaggtctaatatccagaatctataaggaacttaaacaattgaacaagcaaaaaacaaataaccccatttaaaaatggacaaaagacataaacagacacttctccaaagaagacatgcaagtggccaaaaaacatttttaaatgctcatcatcactaatcatcagctaaatgcaaatcaaaaccacagtgagataccatctcacaccagtcagaatggctactattaaaaaatcaaaaaaacaacagatattggcaaggctgcacagaaaagggaatgcttatacacggttggtgggaatgtaaatgagttcagccactgtggaaagtagtttggatatttcccaagaacttaaaacagaaataccatttgacccagcagtcccattaccaggtgtacatccaaaggaaacaaattgttctaccaaaaagacacatgcactcccacattcatcacagcactatacatgagagcaaaaacatagaatcaacctaggtgcccatcattggtggattggataaagtaaatgcagtatatatatatacaccatggaatactatacaaccatgaaaatgaacaaaatcatgtcctttacagcaacatgagtgaagctgaaggccattatcttgaggaaattttaacacaggaagaaaaccaaataccacgtgttcttacttataagtgggagctaaacatcaggtcctcaacaatagacaatggggatgactggagggggcagggagtggggataagcactgaaaagctaactgttgggtactatgctcagtacctgggtgatgggattatttgtttatcaaacctcagcatcacacagtatatccaggtaacaaacatgcacatgtcctcccaaatctaaaataaaagttgaaaaaggaaaaaaaaataaaaatattaaaaagtttaaaagaatagaaacaaaaagagaagtcaagtcaatggcatatcaaagattatccacaaactacaaaataatcaacacccacactaaatgtacaaacttagtgttatcagaacaaagctaatttaccatttgatttttctttaagttagtctcaagattactccagcgtaccttaacaatttactagtttctgctctgtagtttaaactgccatagtgatccagttctctcttctattattattatacttcagattgagtcaagagaaggttagaacatttgtacagcagagaaatgtccttacctttcacaatggtgagggaagaaatttaaaacttcccttaacatctgccatccttattacatgaataaaatgtcagtggaaacacaaatcattatgagatctataaatacaaaagcaggttctacaatagtgtcaaatgtatcaaatacgtccaatgtcaaaatctgagctggcacatagagctaatatgctaaacaacctactgtttccccgcttcctcaattaatctcagggaatcacttcatctgtaaataaagaatttgtatatcttataaagccatgacgtttttaagttgaaaaagatatagtctaatccagacccagagatgtcaatggctttcccatcattgaatgaactccacagacagcagcagcaactagattctaaaaggggtgctaatgtctgcacacagcagctcacacctgtaatcccagcacattggctgaggtggaagaaccatgatatagtttggctatgtccccacccaaatctcaccttgaattgaagctcccataattcccatgtgttgtgggaggaacccggtgggagataatcgaatcatgggggcggtttcccccatactgttctcctagtactgaataagtctcacaagatctgatgattttataaaggggtgtcccctttcgcttggctctcatgctgtcttgtctgctgccatgtaagacatgcctttcaccttccaccatcattgtgaggcctccccagccatgtagaactgttgagtccattaaagctctttttctttataaattactcagtttcaggtatgtctttatcagcagcgtgaaaatggactaatacagaccacttgaggtcaggagtttgagaccagcctgggcaacataggaagacccctgtctctaaaaaaaataataatttttaaaaaattagccaggtatggtggcatatgcctgtagtcccagctactcaggaggatgaagtgggaggatcacttgaagccaggagttcaaggctgcagtgaactatgatcacaccactgcactccagcctggatgacacagcaagactctgtctctaagaaaaaataaattttttaaaaggtgccaggaaggaggcttacaggggaaaatagcagtcatgcttggctctctgaacagcatcttagtccagttccagcaagtcttcacatgctattccatgactgggagatggaacagaagggatttagccaggttactcctcctccctctcattcagaagataaattagctgtaggacaggacagtgctgggttgggagtgctataaggtttgactatcacctgaggtcacataatcaatgatcctataaaaatgacttaagtaagaatccaggacatattagtacgctacataaaagaggcagaaaacagctaagtaaaccaaaaggagagatgaatatgtggctataaccttattccttatataagcatatgtggtctcgttggacattctgtgtttctatatattaacaatcacagtaattaccgtacaacaaaacatataatcaataagaattcaagtctctatccattctcatgggtcttgataaaacataggatattactcacatacatcaaaacacctttaagaactactctgtacccagttcttacactcattgttctccaaacggaaattagctgttcccagattctcactacttctgaaatctttcctggaaacccagcctatatggctttcttctgaccttctcccctctacacttggccccattttttgcttatttgtttattttctcatttgtttcattaggaaaagcccttgagcctctctgacagctccacttttgttttcctttgcccattactcagattctgctcaataaaggcaagttgagggctgataccctatgcaaaattcatttttagaaggcaagggaaagagaaagactgaaaaatatataaattaatcttgttcatcccatttaaatacaaacgtacatggatttgcaagatttatttctgtatgtagactgaaaaacttgttattgtcttttgatcatagcagcttgtggtaaaagctctctgtttatacccaacataatgccaagagcctgcacagacatcacagcatctaagaactcgatcattgaggaggacgtaatggcaatcaggtaggaaagctcagatcagcctcttagagttcagacaggaatttttaaaatctgtagcattattagtagacactctgaaagcccttcctgaattcaatcgtgctgaggaagggataaagctggatacttccaaggccccaagagtgctcttgttttttaaaaacaattgttaggttgtttggtgtttgatttaattaatggcaaaaggctttgctctcatttttcattattaaacccaatttttattcctttaattgaaatgtgcataaaatgtcctttactccagctctgttaatgagactaaacagacacatacgacttcatctaagcacacccaaccatctactcttctgtgctaatttctatggatggaattttagggattgcctctatttgcttcacattttggtcctgagaacatgagatggggaggcctgtttggaggaagtggagaaagaaaaagacaacaaattattattattcagtgcgttcatttgataccttgataaatcaaacaggaaatcaatagtcaccataagcctctcaaatctacttttcttttgtcaattggggacgttacttctgtttcccaatcctagtaactacaaagcccaatatttcattatgccccatctccgctattacaagatttaatttggggaaaatgcaaactgctttttaaccatctctctctcaatgttaaaaaatggcttttatattcaaatcgatctgatagaaaatattttaaaagcttgtcattgcccattgcaaatgcttgctaggacactctggtgtgtttcaccattattaaaacagcaacaaaaaataaataaataaagtaaaacaaaaagaaagcccatctggggcctgggtaatgcaatgattgggaaatcatatctgtttgggtagaagattagaatcaaagaatgcaaccattttcatcatcagtataactctttgtaactgatttcagagacggccccaaatggacggaactgctcttttattacccacattgataaatgtgcatcaatttttcattttgaagcgttatttccttttgcaatttgccaagtgccttttcatgccctgcgtgaagactgtcccacgaacgaagctccttcggggtagacaagttaattatctgactgccactctgattgttggctgctggaaataaaagtctttaccagccctgatggtgaagcgccaacactgctggttgacaatgatgtcaaattcctatagaagcagttcagggacaggtaggagatccaccgctgaaaacccagacttggaatggggcaggtctggatgcaaattccgtacttcctggtataactttaggcaagttattcaatttccatgagcctcagcttctccatcagtaaaatggagataaaatgtgttccgaacttctaagattgttacaaagattaaatagcatgatgtatactgagctcttgacacacagtaagcattgaataaatacttctgttttgatcatccgcaacaagtgcacaatttccttctattcaccagacaataatgacagttatttcatggtgcttccctagacattacttcagaaacatttccaacagacatatttcttccactttatgaatgtttagtgatgcatattagtggcctcggaggggatgttgaaaagtgtttctcctcagtctggctcctcaagactcttggtgaacatgtataacacatagctgctggttgggaacaattttcaagaggcaaattaatattcctagggacttcctccttttccgtaagcatacatatgtgactgctacttccacaagtatattctttttagtcatctaattacaaaggtgcaaaactgaagggcctagaacaatgccattccctagttaaaataattagtttgctataaaaaaaaaaaagggaaagaagagggcaggagagtccctttggtttagtatttaaatattcaagctgtggggtgtgttttctaatcggaatttcagaagaggaaaataaacagtacaagagccaaatatgtattaattatggtttatttatttaatgccaccgatgtgtatcaagctatgcaaaaggtaaattgaaggcggaattgaagggcaaaaataaggcgtcagttcaagagagctgactgaatattttacatagaaatcggtgactgatgatgataagaacctgtagtaaaatccacagtggagatggagtagggacaaggttgaggggatgagaagagaggactgaaagagagaacaatgtaaacactgtttaagatactggccatgctatgacatggccagggaaaagtccctctcccccctcctggcttctcagaaaccttcgtggatcacattagataagattccaaatcagacgcagtagtgtagacctcctgaccacatagtttaccactgatttctttttttatattaatttttattccctattacacatactatttttgtatcatactttaagttctggggtacatgtgcagaatgtgcaggtttgttacataggtatacatgtactatggcggtttgctgcacccatcaacccatcacctacattgggtatttctcctaatgctatccctcccccagccctccatcccccggacaagccccggtgtgtggtgttcccctccctgtgtccatgtgttctcattgttcaactcccacttataagtgagaacatgcagtgtttggttttctgttcttgtgacagtttactgagaatgtttatcactaatttctagtcatgcagaaagcaggctcaggatgcttctggtaagataatccctctttgatgagttaacataaagaaaatcaccagtcctgacagcaatgtgtaactgtggatacttatggatgcaatgactgaagtgttgctgcttaagaaatgcctgctggatgattccagaacttaggctcatccagaaccctgctggatgatccagaacccacactggttctggatgatttcagaacccctggttcatccagaacacctgttagatgattccagaacccacacgacaggcttgtgtgagtcattttacaacagcgggaaccgcagaccatccccttgatttgatttcctaaaaagaccttattatttttgatcacctttactgaggcttaagttacatacaattcactcattttaaatgtgcacatcaatgagttttgatcaatgtgtacagtcacataaccactatagaagcctgatatagaagattgccattatcccaaaaatgtttggcatgtccttttgcagtcagtctttaccctcactccaggccctcgcaaccactgatcaactttctatcaataaacttttacctcttctagaatttcacatgaatggaatgatacagtatgaggtctcttgagtctggcttatttccctgcaataatgcctttgaagttcatacatgttttagtacgcattcaccgttcagccctttttgttgctaatagtactctgttgtatggataaaccacagttggcttatccaaggacatttgggttgcttccagcttggtgctattatgaaaaaaagctgctatgaacattcaagtacaagtctttgtgtgaatcgatatttttatttttttctgagaaaatacctaggaatgagttgcctgatcatatagtgactgttatttctgttaacaagaactgtcacgatgttttctgcagaggctacaacatcttgcattcccatccttgttaacacttgatgctattaatatcagtcattaattttaaccattctagtggatgtggaatggaatctcattgtggttttaatttgcatttctctaatgagcaataatgttaagcatattttcaagtacttatttgtcattcatatctatttttggtaaaatgactattcaaatctcttgacaatatttttggtgggttatctttttattgagttgtaagggctctttatgtactcaggacagaggttcttgatcagatacttattttgcaaatattgtctttcttaatattttgacagtgtcttttggagaggaaaagattttaatctggacaaagttcaatgtatcaattatttctttcataattgtttttgggtcctatctaaaaatttttgtctaacccaaggtcaaaaaagattttctcctactttatgtggaaattttatactattagatcttacagttagggctatgatctatttcactttaatttttatgtatgaaatgaggcagggattgaggttcatttttgcatgtgaatatccagttgtttcagcaccatttctgagaagatgactgaattgtttctgcacaaagctggtcaatgcctctttgtagctagccataacggcaatatctggagtgaaaggtgaggataagacgattttgaaataatgatggagctgtcaatacacatattatgaaatatcactctccagccatttaaaatgatgataaagttctatatttattgatgctataaagattaagtgatgaatacaataccccaaaacagaacacatggggtgatttaatgtttctaaatagagtatgagacaaaataagatacacagaaacagactgactgactaaaagacctactctgaaaagctaatcatgatcatctctaggtgttgaattaagagtggtttctattttttgtaaatgtttaaaggttttcaatatgtctgggagatatatttatgctaaaaaaaaaagctatttctctttttaaaacattgttgtgggtggaaaaaaacagaaataagggtgagctattgttgaagttttatagggcgaattcattccatttactactataaagtcttaatgagtctcaatgccacatgaatagcgttgaaaaaaatgccaatacagttccaaacaaggtacaattaactgtaaaatacattctgacatctgcaactcctgtatccaaggatgctgaagttgaatgtatgacaggatgaaagttctgggaaacataaataatggcagaaattagcagccaagttatctcaggtctattttaattcatattcaattgtttatggccataaggcaatatcaagctactttctaaagaatcttggtgtgtctcctaataacctataattggatggtctaccttgcaaattatctgcagtggctccagaattactatccccattcaccccaggagctcttcagctgagtgggatcatgtaacccaacacctatcaagagcagagcttaaaaccgattcaaagaaaagaacaagataaaggaattggggatggattagcatagagaagagatgcctgagggacttctaaattactgctttcaaatttttgatagtgaaattattaaccagttggacaaaaaacagaagggaattaaaattaaaattagaaagatttcactttggccaaagggtatatttttttaaataacattcttctgttcattcaccaaacatttttggagcctccattttagtctgggctattccaaggagctgaagtttttcagtgatgaccagtcagggtctcagattctaaggggcttaaaactggatggagctggatgtcaaagttataaaatgccaggaaaaggccattgaaactgattaaaagtctccttgcattgtcgagcttgataacattacttgccccagaattattagacatctttctgctgaaaacaggcactgagccatgcattctttcaggtcactcccagctttgggaagccattccttttggaatctttagtccactactttagactcatgttaacttctgaattttagttttaagactactttttaagatactgtttttgagcacatattctgtgccagttatttcagtaagcactttacacatattatatattctacttaattctccctattaccaggcaatattagtgtcctcatttaacagatgagataagtgaggctccagtggcttaagtaaattacaaagtgagacagcaacagatgtgagatttcaatcagtctgtttgactccaaagctcttaaccatctttctctactgtgtgtcttttatccttgaaatcatcccataaatgaagggttttgtagatggctgattaagacagcaactccttccctaaatataggcaggaacctagcctgggtatagggtatttctagcataaatagcaatatcctgtcctttggggccataagccaaaggactccaaggttctggcacaggaggcagtccagtgtacgcaaacacctgcagtaacactcaccaagttcaacaccaaatcataacacagaagtttgctcttttgtagttctgcccctgttctgactcctggattcagaaacaagcctcacatcatgaagtgggagtgttcagtaaggatttgagccataaatgaggaaagcatttaagtatacaatggattgatgcttccctcccccacctttcaccatcccttgtgaatactgttccctgcttatcaaggacatgatgagtaattctggctaattaattagctccaactcttcctggctttgggacagaaacagtcatttaactttcctaatcttcaatttcctcatagatttatcatgacgactgcacaccataatatggccattatgataaaagtataccttttagcatttatgaagcacttcttgtgtgctaggcactttattaagtgctttacctgcatatgtcactcaatactcaaaacaaccctatgaggtatgtgcttctatcatccccacttttcatatgaagaaacctacagagtggtagagccaagagtcagaaccagagtatgtgacttttgagcccatgttctttttttccctaaatcaggggtcagacaattatggcccatggactaaatacagcctgtcacctggttttgtaaacaaacttttattgaaaacagctacatccatttatttacatatgatctgtggctactttcacattataatggcagagttgaatagctgcaacagagaccatgtggtccacaaagccaaaaatatttactatctggtcctttacagaaaaagttggccaatttttgctctaaacacaatcttcaataactgtcttcagctctagttgacaggcaggaagtcataaagttgatccgtgatctcgatgaccacattgtattgagtcactaaggcaagactcttgaggcctttagcaaactgtttattattaatttctagtgttgcagcccaattagttattcttgcccactgcatataaatgccaatatactgggacagcagtattgcagcagagaaagagcttatcacaaggcagccaagtggaaggacaggagacatttctcaaatccaccttccagagaactcagagactagagtttttaagaataatttggcaggcaaggggactaaggcgtgggcactgctgattgattggaaatgaagtcataggggtgttgaaactatcttcatgcactaaataagtttctgggtaggggtcacaggaccatttgagtcagctccttggtatgagtcacaggtctaggtggagtcagtctgttgccagaatgcaaaagtctgaaaaatatctcaaagaccaatcttaggttttacaatagtgatgttatcgatgggagcaattgggaaaattaaaaatattgtgacctgcagctacaggactcctagcagaaagcagttatgaaaaggcaagttataaaatgcctatgttagattttaactgtgcctccatcctaacagaatgcaggcacttaccataattctaaccttgtggccaatttgttggttttacaaaggcaatttcagtccccaagtgaggagggggttagttttgggaagagactgttaccatccttgctttaaactataaaccaaattccttccacagttagcttggcctataccaaggaatgagcaagaacagttagtgtgtgagtgtgtgagattagaagtaagatggagtcagttatgtgagatttctctcactgtcataatctttgcaaaggcaatttcactaggaaagggcagagtaagcaacactcctaaatcttgcttggccaagagtcctttatttggtagagcatctggtaggactaatgctcccagaatacacttctgggaatgtggttctagacagtcctggagcaaatcagtctttgcgaatgttcaaaatctgtaaaagaaagtaatactgggtagagatcctcccaaagcctaaacctgtggttcaggggtctaccgcccactaatcactagactttccttttgaaagacaagaaaaggcatgagtcataggcaagcgccttttcaagcataactgtgagctatgtggggactttgggaatccagcccccaaattttagccaaatatcagtgaaaaagccattattgattccatcaataagtagttgctgaaaaccaaaagtaacctggacagtaaccatttcccccaatatcctgtattctatagggtattttagaaaataaatatgaacgagcaattttcataacattctgtttagatttctgtgattttgaaaaataacactcccagcttccatagctctaatcatcatagaaactcctttgcctctcatcctctgggcaccccctccttttcctgcaggtatttatgtggctgagtaccaaagcaataggaagagatgaaggaaagggtgtgatatgttggtaagtggaggtgggatgagaccacggttttcaggcttgactttgtgagagtcatgcttttcaaaaacacatttgcaagtctgatttaagaaaataatttcacaaaaaccctgccagcattctcaggaggatactttcctcatctcccactgtcggatattagaaggttttgaggctttttgaatgaagactttgggatcacaaatccctacctgaaaagattatcagggaataataacagagatctattaaaccctattactcaacttacctaattaacaccccaacaaatttacctacataattttcttgtattgatatacaaagacgagatgtaaataacattgccaacccaccataataaaagcagctaataaattattaaacattccctaggctgataataagccaggcactttacatatatcatctcatcttatcttcatcccagcctgtagctgatattaacgcctctctttcacggtcagggaattagagctcagagaggttaagtaaactgtccaaggtaacagagcaatgaaatcaggatttaaactcttgcccgaatgccctagcctaggctttaagtcactcactgtggattccacatcgaagagaagcagacagaactctggtagcagttgtcatcttaatctcaacatgctatttgaggttttgtgttttctttttgcttccaagtaagatttaccaaaacagagctcctcataaagccacatttgatcaggattaagaagccgacagtgaagctatttagacaaaacctcacgtagtcttacagcaggaaaatatccacctccacgccacaccccactccaccaccactgccttcctttatttggaagcttttcagatttttatgctaacacactgtgggagtttgacatggcccaccctgagagctgagaattttttttttttttacatttttatcctgtgtttcaggaaaattgaagagagaatgaaaaaaaaaaacaggaagaggctgcttatctttttagcactcattgaaacaattcagagtcacatttgacgtagtttcctaaatcatcaagcaattattttctaccacaagaaaaaattgtcagttagacaggaagccaattcaacaactcttccaaaatctagggattcaacattaaaatctccactaacaaactagtgctagtattaaaaatcataacaataacatttgtattgctcaccatagtcaaagctttgtgctgagtgatatatatgcataatcatatttgactattataaccttataaagtaagagctcttattattcccactttacacgtaaggaaaatgaggctcagaaggattaagggattccaccactttaccaataacatagctgggattcgaacccaaagcccgagtccacagtccagactactaactattcctctgtactcaaggtcagcacaagtttgctgtaaaaggccagttaatattttcagcatttcaggctatgaagtatctatggacctcaactccgttgttatagcacaaatgcagcatagacaagaagtgaacaaacgggcagggctgtgtggcaataaaactcttttatattaatacattctagctgtattttcacagtacatgtgataatctgatacattcatataattaaatcagggcaatgaggatagccatcaccttaaacatttacttcaagacagtaggaaccttcaaattattctcttctagttattgtgaaatgcacaaaggattaatgttatctataatcaccctcatgatctattgaacaccaggtcttacttcttctatctaaagccaacgtaactttgttcacaaaagcaggcaaccaaccagatttggcccaggggtcatagtttgttgacctctgttctattcctttatgaaagagggaagatttgagctgaatctgttaaggatggagtagatttcaaccggtgaggagaggaagaaaagaaaagaaaaaatacagaggtttgtaagcaggtatatatacaagccacaccttatatgggagggttaggaacctttctttgaagaagtgatatttgagttaaagttgttgttttttttttttaagaaaatcatcaaacaatcaaacaaaacaaaaactatccattggttcacagaattggagagtctagaagcacttcgagcttcacatgtggcttgatgcaggtgctcaatcaatgtcactcacagaaggctgaacaagcataaaaatgccttcatttgctcaagaaacatttatggaatttctttttttttttttttttttgagatgtagtttcactcttgtctcccaggctggagtgcaatggcatgatctcggctcacagcaacctccacctcccaggttcaagcgattctcctgcctcagcctcccgagtagctgggattacaggcacccgccaccacgcctggctaatttatgtatttttagtagagacggggtttcaccatgttggccaggctggtcttactcctgacctcaggtgatccacccaccttagcctcccaaagtgctgggattacaggcatgagccaccacgcccagccctatttatagaatttcttctttcacatgagccctctcttagcgctaagagtacccccaatgaataaggctctgtctttgacttcaagaaggtcccagtccagtgggtgccaccataggagagagtctgcctgagggtaaaattcacacagaagaaaacaggactgagaagtggagaggaagagagacttggtggcattgatgaagcatctggatcaagccatgcctgaaactagacctacatctcgacttttcaattccaggagccactgatttccttctactttgtttcttgtttcttcctggttgaaataacttcaactcaaatattccttcttcagagaaactgaagctgaccatccaatatcaagctaggtcttctcatatatcctttcataatgcctagtactttttttttcagtgcacttatcacaatttcagttaagttatgtaattgatatttttagcagcaatctctctttggagctctaagagggctcccatattttggtccatagtgagtgctaaataaattcattgtttttaatgttctagagcatgatatggtttggatttgtgtccccacccaaatctgatgtagaattggagaaggggcctgatgggaggagatcagatcatgggggtggatttcccccttgctgttctcatgatagtgagttttcccaggatccgatggcttaaaagtgtgtgacagttccccacttaactctctctctccctcctgccaccactgaagaaggtgcctgcttcccctttgccttctgtcatgattgtaaatttcctgaggcttcccagtcacgcttcctgttaagcttctggaaccatgagtcaattaaacctcttttcctcataaattacccagtctcaggtagttcttcatagcagtatgagaatggactaatacagaatcattttaggttcacagaaaaattaagcagaaagcacagtttccatatacctcttgcctccacccccacccctccccccatccccccccacacacacatacatacaactttcccaactatcaacatcttacactagggtgatacatttattaccattaatgaacctacaataacacatcattatcacccaaagtccacagtttacattaaggttcactcttggtattgtacatgctaagggattttgacaaatgtacaatgccatgtattcaacattgtagcacattttcactgctctaaaaatcctgttctctgcttattcatttctcccttcaccctaaatgtactaccctggtaaaaaaaaaaaaatttacaaaacaaacaaaagccatatttttatgtctttgctaaatgggattctggcatctcttctggtcttttcttccagcctctaggatggttcccacgagtttatcattccacgcctaggttagggatgcctcctgagagctagaatcagtgctgttaagctcatcagggaggagcacagggcactccacaaagtcttaggaaggcagcaaggaaacatctaggcttatgctctccatagctttcattctattttttaaactagcagcccaactgctttttgtcctgagtgccaaaatgcatctggaatgaggcataatcctcccacttccaacagactcacttggtgtaatgtcacaggtaaatgtatcagaacccagtagatgttctacttatgataattgctctgaaatgttactaacacttctcaaaatataggtgttgccttggagcatgtgatgagaatgcagtttgcctcttttctgtctcttcatcttggactccctcacatagcaaaatgctcccaacagttaacgattctgttttctcggtttatttcaagggaaaggtattccaagcctcatgcttcaggacttcctatctgacctcagtaatgcaacttatgtcgtatttatcattgccaatattaaagaaaagaatatgggttgccccccaaagtcactgaaaacactcgctctttcaattcttgtctgcctgctaggttttatgacaaagacagattgggagagtaggtggtgatacgatgtggagtacaccttcctgtttgaaggcaatgagtatacttcagcaccaactaattcagtaataagagaccgcattgctgcatttccaacatctgcctcctgagaaaagtcataaagctcatccatggcttctcctggcctttacttcctgcctgatcctcaaaccgtcccccttccgtccccactgaggggtgcaaagcatcagccacaggagaatgagattttctctgttctgggatggggtgaggctccaacaccttgagctttaccaccttaaagaatagatcctgcaaggaacgggcaagagaacaattgacaggatttgggactctccttatacgatgcttcattcattcaacagatatttattgagcttgttctatctgccaaatagagctctggggatgcgacgatgtgaaggaaagaaaaaaaaagatgatggctcatgccttcatgaagctaaaaatctattcagaagacaaatgttgatcacacaaatggcacaaatacatgtaaaaaccccaactatgattaatgagctgtgttgcctgcaataagctgcatctccagatcccaccacaagatgacagtttcattcatattttatgttctatcgacaagctatcctgtaaatttcatccacatttggaacccaccaagagctcgcacgatatcaaatatacagggcttttgtgcaatttcaaaataaagggtggctctggttggaagtaaaatttccaggaaaaaaaaaaaaagcctttttagttacctagcctagcatgaggggagaatatcaagcaatagtgtatgtgtgtgtgtgtatggcactgcagaaggagagaaaaaaacaccagaaaagtggggacacacctgctctacacacacacacacacacacacacaagtgcatactctcgaattcaaaatggaggaagcttgaatgcttcctgggttgccattgctgtttgttgccgtgtgttaatgacagagcattgcacttctctccgatgtacacaaacaaagctgagagctgttaataggtttgaaatgacattacggattgctcaaaacaaaactgttactgtttcagaggcagaccacaagggaaagaaaactcagagtagataaacccgcccagaatccccctgatgtgggaataaaaccacagtctcaaattttttattccacaccaaggccagagactggaggagacaccagtggaaaatctgctcaacttcaagagttagctgtcacatcactgtggctagacaccagctccctccatgccagtctctgctggagtcaaagactgaaaagaaaattccaaatccagttctggtcaccaatctaaatgattaaccgagccccattctgcatacaggtagctgtgcttccaataaccgcaagtaattagctacttcgtgattctaagagagcctcttcaagaactgtttcagccatccatgcaccaactggttaaatcatgttgctgtatctctgatttcagactgggtccaattttcagctctgccagttgctgtgtgatatcaggcaagttatctaacctctctgagacccagtgttttattctgcaaaaataggaataaaaggtagttactattcactccagttctgaaattgtctgcatggattgaatgtgaaaaaatgtgtgaagtagtaagcagagtaggaagctcacattttgtttatctcccaccaatttagtgcaatattaagctagatatttttctaagctcttgaaaattattaatccatttaatcttcataccattattttctcttttccaaagaaggaaactgaggtatagaggaataaaggatatctccatggtcacagcttggagagctatgactcacattcacagctggctccagaatccatgcacctcaccactgcacttagttgggaattgagaaatgtttatcagtctatttcatccctcatttcaagcagtctccaaatccagctgatttatcttgcctttgatggatttcactcaactcaaccaacctttccattccactgccaccctttacaaaattctggtcttctactgtctaatccacactacacgtgatttaaaaaaatcaagtctgaaatattactttcctgcctgcccatcctgctgaaacccattccatagctccccttttcttgcaagatgaagcccaaacactggtgggtccttttccaaccagaccaacctgcactgcctgttgtcatcttgtaaaccctgtgcccccatcactctgcaccatccagacctccacatgagtcgtcatcactctgcccaccccacgtgcactcacactggcactttccccagaaatgccttctccgctcctttcgagcctttgcacacctttacaactctttaagatccacagttcgagtctatgagtgaagtttaaactgaaaaggtcaatgacaagtggtgaactagagcaaagaatgcaatggaagaggtgttctaggaaagatcaatctggtcacagatcctacttaggatctgtgagatctttagagagagacacagagagacaggcaaagagagagagattgagagagagaaaaagaagggaaggagggagaaacagggagaaagattgaaagagagtgagagagaggaagaagggaaagaaagaggcaggtgagagacaggacagagagagattaaaagagagtgaaagaaagagaaggagggagacaggggagacagtgacacagaagtagaggaagagagagagtcggcattggcggaggaaacagggaaaccagtgagcccaacattgcagttattcaacatctctttctttgattaaagacagagatctcaagcaggtgtccaataaatcaactataacccacagatatgtatctctgcttcataattgtttaataaggagaattcacatgaaacttcacatttctagattctctttaaaaatcagaagatttagcctgggtgtggtggctcatgcctataatcccagcactttaggaggccaaggtgggaggatcacttgaggccagcgtttgagacaagcctaggcagcatagcaagaacctgtctctacaaaacaaaaaattaaaaaattaggcaggtgtggtggcatgcatctgtagtcccagctacttgggaggctgaggtttctgtttcaacaacaacaacaaaaatcagaaaatttagtcaccctggaccccacgttccccttggcaacatttgtctaatctgaacatcagctatttcctttggatggcacattcgctctccactttgccacactccccactactccctattactcctaaacactgaagtcaagttatggcttatcattactcttgcaatatttcttttcttgagtagaagtctacttctcacaactaaacctctatcataagaggcaaaatcatacacagaccaagaggaacacatatttcaaggcaaatggaggcaaatatcttttgggtagaagtgaagactatcccatgtcttcaatatgccaacatctggcctgattcactgtgtacctaccataggttgggcccccaggcttatatccgtcctaggacttggaccttcctgccaagccttgctctggttgcccttcctctcattccatcttccaaaccaggactaactaggtctgcccccaaggttgggtccaatgccctgaatcttttctaacttgctctgactccagtacttatcctcctctttggacactgctcactaattaggcagtcacataaactcattctaaatagggtatgaagggctgaggatggcttcatatactctacctctcaggttacaacttaacaggagccttctgtgctttaacctaatagctataaataggtttcctgaagcctcaaattcctaatgagttcctctcaggtgctgctgtgggaagtcagtcctggggaatgaggtggagggggagcaagataaccaggacagcagctgcagttttccctgccccgtataatgaagttctgtgtaagatcctacttggaggtgagggtggggtagaatggttccactacctaaacaaataataataataaacagtttaagtttgaaaagcaatggtgtagcagttatggttttgttgcaagtaaaagaaaccagttccagctaatggagtttattggaaggataatgtctggaggagagaggtactcacagactctatggggagcccaggtggccaggcttgacagcaggcaggcaggcactgagaagcaggcagcaggaagtcaagtaggatgtaaaggaaccaccctgtagccaaacagttcggacgccatcctgtagccactgctcttgtcacagctggaaggaatggcttcccatggtgaccctctcctcacgtgattcactcagaaatcaaagccctagggaaacaccttccattaacccaggacttctccactgtgacacttgctgacatttagggctggatctttcttttttgtgggtcccttcctgtgcattgcagaacgtttagtagcatccctggcctccacctgccagatgccagcagcaccccccaccaattctaacaaccaaaagctgtctccagacatcgccaaatatctcctgaggacacaactgcccccagttgagaaccactgagtgagcccagcttcagtcacacgctggctattttggagcaccagggcaggctctgtgagctctgctttcctatcagaaggcagatgcctagaattgtcctccacactccatacaataaagacaattatccaccgaattaaatcaagagccatcaaaataacaacaatgaaaaggtaaaaatccacaaatgagaagcaccaccactttgggctgtaagcagagagggctttctttcctcccctgcagaccagccaacagacatcacagatggaggacagggctttcccggaggcctacacatcagtgatcacctgcccccacattggcccttcctaagccacccatcagctgagcacgccaagtcaagttgaaagggaaacagctggtttgagagacttcccatctgaattccccgctcaggacttctctgggttaccagatgggatttagagacccttttaatctgggtggtgtgggggcacaggttagctcttcattgaagaagagagcagatttgttcctcctgcacccgaacttcagtcacgctgaacctgcactgtgtgactgtcatggtttcgggattacatgaatttgctgcagcaaacctgcctctgccattgtgtgtgtattagtccatttttcacactgctgtaacaaactccctgagactgagtaacttataaacaaaagatgtttaaatgactcacagttccacgtggctggggaagccttaggaaacttgcagtcatggtggaaggtgaaggagaagcaagtaccttctgcacaaggcagcagggaagagagtgcgagtgaaggaggaactcccaagcacctataaactcatcagatcctgtgaatactcactcactatcatgagaacaccatgggggaaaccacccccgtgatccaatcacctcccaccaggtgcctccctctgcacagggagattacaatttcagatgaggtttgggtggggacacagcgaaaagaatgaagtacaaacctcatatctttgaagctcttaaaactttcaaactcagccctaccagaacaaatggcttaagattattcaaacaatgagggaagaaagaaggtggaaaatgaatataaagacaaaaaactaaataaataaataaatgtctaaagaacttgattgacctctaaatgtgatgtctgaattttaagtttgctttccacttgcaattcattcttagtacacaattacatcttaaatagataatcctctgtagaacagttcttatgtaaacagccagtaattttgatatattagaattaaaagaaatttcctaaggccaaattctgccatgttttaagaaatatgccttggttattccaggaataattttgcttcagggacccaattaaagttatcaaaactgtaggttcttctggatgctaaaaatgcaatatattttgtacatacctctacaggttattatttttagggattttattttacagacaaaaaaacatccaaccaaggggaagggtttttagaagatcacataattctaaaccgcaaacaaaaagcacaaagctctataatcatgaaggcttgtaaagaacaagcaggtttgctcacggacagttgaaataggtttgcctgtgatatgaggcaattttcaatgctttgaagtttaagatgcagtaagcacagttcacatgaggcataatcgagaggcagttgtttgtttctgctgctgcaaaattatggggtatcccatatgggctagcatcttgtgcgtttgtatatacggtaatttccctgcaagaagcctgacattccatgctttcttcaggaagaaatggaaacagtgctggggacagctgatgacaggttttcaagtgtctccatcctcatgcctgcaattgttaaaagtatgggccaaccagaccagccaaagaggggagagacaaatggaaaaggtgttatgtgggaaatagaacaggtaaataaaaacagttctgtttctgagacccgtcaaaatatttgtcatcctgataacagggtgaagtctctgacagatttcacttagccaggtattttacttgcaagcaagattggagcaacttgacctttatcatttcataacgagcaaagaatttgcctgtcatgctgcaatttctgttatgtggcttcaagaagcaaaagagagaaagagaagagagaaaaagctcatttgtcgattttcctgttgaaatatcaccaactcaacccatgtgatgtggtccaactgatgggaccccagtgtggccaccagaagtaatagtctgggagaatgagggtcccaggggaatcctcctggagctatggttacaaatgctgaaattctcagatttttttttcaaaaataagtgaatttttttctatagtctaacgcagggggcagcaaatgtttcctgtggagaactagacagtaaatgttttaggctgtgtaaattctatggtctctgtcatgactactcaactctgctgctgcagcatagaaacctactgtaaatgaacgagcatggctatgttccaagaactcttggttttacagaaacaggcattgagctggctttggcccgtgggccttggtttgtggactatactttaaaggttgaccaggctttgtaggccttcatagcctcagagatgccacccaatatccaaggtttgggggaatctctcaatgtgacaactaggaaattttgcttcaaccattctgtagtgaattcctgtaattttacattgccttgaaatccattttaaagataagtttaaacttctcataccagagtagggcttagtcacctttgacacagtttccagtcctctgcctactcctagtttcttgacatggtggatccagatatcagcggtatacaaccgcctcctggcctcctggttgggaggtggccacttccttatgggacagctgggtaccacctatctgactcactcccctggcccccacaccccccatggactgcaaagacatgccacagtttgaccacctgttagtcaccccactcagaactcgcacccacctgtgtgctctaaacccaccaattagagctccataggaaacctccatgggcaacaccctggccttaataaggtctccaaccctcaggttcctctccctctaccctgccttctgtctctctccttctctctgtctctctttctgtctctccttctctccctctcttgctgtctctctctgtctctctcttgctgtctctctttgttctctttgtctcactgtctctcttgctgtctcgctgtctctgtctctctgtcttgctgtctctctgcctctcttgctgtcttgctgtctctctcttgctcgctgtctctgtctcctcactgtctttctgtctctctgtctctttctcactctctatctctctctcgccctctgcctctctctctctgtctctgtctcttgctgtctctctctctcactgtctctgtctctgtctctcgctttctctctctcactatctctgtctctttcgctctgtgtctctctctgtctctatctctctctgtctctctctcactgtctctctgtgtgtgtgtctctccccatcccctggctgatcttcctgccccctcagagtttctgacagtctcccagaggcatctctaacctcccaatctgtaagtaatgcatttcttccatttcatgccatttggttttgccttttcttatgcctcacctgactgacacacccaaacctaacttcccccagagagggcactcctagaaagcgtctatcttggtttatggccactcaataccaaatcagaaaccataacaataaaaattacaacaaagaaaaaaaactctataataacagcagagcttttttcaaaaaaaacctacagattatatctttattcctcacacatcctcaaatccactctgaaaacagtaacaggtactttcaggccagtatggcaaagttgccggaagtgacccaaaatgagaggatggcagccctcagcatctatcaccgcttaggcaggtctcacgacagactgagtgaaggtgggactgctcctctcccacttgttcacttttcaatcccatgaaataccctggcttttacctccagccagagtgccccaaaacagcatcagctctcacagccctggattcaacatcccccccaagatcagtggagtaggaatactccaacagcccagtgtccaggctgttaatgcattcttcatgcacttgaagtgttgggctttgtttaaagcatcacttttttctaaaactaaatctctctaaacattcaatgatggcaaggcatggttcacacctgtaatcccagcgctttgggaggcagaggcaggtgcatcatttgagatcatgagttcaagaccagcctggccaacatggcaaaaccccgtccctactaaaaacacacaaaaaaagccaggtgtggtggcacgcacctgtaatcccagagactcaggaggctgaggcaggaagatcacttgaacctgggagatggaggttgcagtgagccaagatcgcgccactgcactccagcctgggtgacagagctacacttcgtctcaaaaaaaaaaaaaaaaattcaatgctttctagaaaatctggcactttctgtctgctacaaaaagccacttttcccccacccatgttgattaaaacataattgttgcacatttaatatttgtttttcaaaggtccagagtaaagcaaattctcagcgtgattcttcccaacactgctttaaaacaacgtgtgtgaatgtaacctctaaaaatcccaattatgaagttgtctcacaggtggcccccgacctcagcattcctgacctttatccatcctggcccttaagtggatagccacatacttggacgcctgacttcagctcttttgggctccttcatctcccttctgtgacccttggtggaaaagcccagagcctctaactttataggtggatgagctgtggcctgaccttacttaggaccctaggcttgtcattcagcctctgaaagctccccactccgtccccacagctagcagggccacgttccaaggaggagcaatgaacagaaagggctttgctcctggaaccaggtgagcgagcgtttttaagaggcttttctagccatggcagagcaatttaaataacaagggtcaggattagccctttatggtatcgaggtggggaaaaaatccgcagaggcagtgaaatgagaaaggtagactagcattcattctcttacaatagttccgtttcccatcttgctaagcacacacagccgtaattatattgctttccaccgacttgtatacacacttccttcccgccataaaaacacaagcgcctccatagatgaaaactgattttaatatagaaaccccagtatctataattcatgctctttagcctttacatatttatcctgcattttaattaaggccaaaatctgaatactttagatggatagtttcttttctcttctatgcatagcttataggtaaattacctggcagaagcccaaatgttaagcaaacacaatagaacctgggactggagtaagctattatcggacggtcagcccaggagagcttggaaagctctctcctttcaaaggtaaccatctgaagactggcaggacttgtctcctgcagttgcaaaagaatgagaagataaaatccccaagtttgggcatgacagtacagcccacctctccacagcaaaggcgtcacctccagtgacatctgagaagagaggacgggaggggctgggagaatggaaaggggtttgaaagacccctgaagtaccaggaatctatcctctgggcctaggacagtagttcccaaaactgaccctggaatggtccagctgacacagagaacacatctaagattagaaaagccaaaagttcacggttggcctttggtaggaatgaccagatttttcgatgaaatgtttgatgctttgaaaccctaggaagtgcctccatgaataatatatcaagaacggtgatctttaaaatgcaaaactccacctaagcctggcccaagtaggtaccaatgtggtcttttttaattgctaaagcagtttagcaaactagagcctgcaggccaaatctggaccaatgcatgtttttgtaaataaaggtttactggaacacagctgtattcacttaatgtattatctgtggctgttttcatgttaggatgacaaagttcagtagttggaatgcagatcatttggcctgaaaagcctaatttcttctctgaccctttacagaaaagcttgccagcccctgcgctcaagaattgcttcttcacattctgccttccagtttcttctttcaggaaaagaagtggaaataaatctgagacatttggaattgccaaattctctccattgtactgtttcttctagtctttacaaaagcaaggaaaagaactgtagacatttcttgccaatcatcttctctggaggtaaaacagcccatattaattttctaggagtcataacattgtactgggtaacacttccagtgtgtgcctgctaggaggaccagggacccaggtactggactggtactttgtctccattatcttgtttgaatattcaggccacctcaatgtggactttgctagaatatcaataatttgctgttgataagagacagaggcaattttaaaaccaaatctatctgattttaaatctgatcttcttaactacagcacctttgctactgacacttagacactctgccaagcactgtcctcttaacccttaaaacagacccatcatgagatagatgatactgacaaacccatctcacagatcaggaaactgagacttggaaagtaaaatgacttcctcaagatcacccagctcatgtgaggcagtgccggggagtaggctccagagccatcgggtatacttggctgctggttcccgtgactaagacactttgtgtctctggggctcagctttctgtcagtaaaacaaaatgtctaacattcctgggcccaacaagctaagatgaatagagtacctttgaaaatatgaccaaaaaaataaaataaaataaaaaacatgatttgctaaataaataaactttatgagcaatgggatagatttcccctactccccacacctcggaagcagctgcccagtggacactatggatctcaaaattccgcctcctggctccatcatgatgctcattccattcaaggcagatgagatatccaaggtggactctgcaggattacatgcttctctccgtcctcttacatgaactttctttcatagcattgagggttcccagacctccctttgaaaggcacactaaatgcatacacacctaaatgaataaatgaatattgagacagcacaaagaccctggagatgacactgctgtatcaaaactgttaattgatgcttgtaaaggactattttggggtaaagggagctacccagcatccattctgctgtcttgggggagagtaccctgatttcctttgcggtaatcgctgtgcccatgtggaatcagttcttcaagactgaatttcaaatatgccctccctcttttgggcaacagcagaacacacctccagccaggcttctcagagctggcctggaaaactccaaaaagagggtctttccagtcaggactcttcatagaccctgatagcaagactctctgcagcaactgagttttggtaccagctaagcctggcttccaaatctccctctgtcctgtgaattgcctggtagcctctcaataaatcatggcctttcataaactaacaaactggtttctgttgcttgtaaccaaccaacacaaatttttacaatgccagaagggccgttcttgaaaaaaaaaattgccttcattctgtatctttctgtctcatttggggtcctctttctaagcatacttttaaatcaattttgcttccaattttaccttttaaaataaatctagatagccatagccattttttaagtgccaggtagggtggaagttgaccaaatatgaacagaactacaaagttaaattgaagagctatgctttataaatacctgtcttaaagggtaatacgtcttgagtgcccttacttttattttatcattcagctcctatcatcacttgtgttagcttccctccccagcactggtgagctagaactctgtgaagctgagattctctgaactcaacagggtcttgacctcaatctgttgtccaaacaggtgcaaatttgctgcaaagcatcattgtctgctccatgttttactgttctatttcactaaatgcatttataaacatgatccacaatgtctacagaatttcttaaatctctttctttcaaaaacattacaataaaggatatagagttacttggtataccttgtacctagggaacccttgggagccctttaaactgttactttcttcccaatgtgcctataaactcgtcatataaatatctgtcccacaatttacaccctgcaatggtgacctataatatttggaataaaatctaaacttctgaccatggcaaacgaagccatctagtaaatgaccacttcctagagctccactgcatcgcagacacctcccgacacactcctcctccctgctgccagctcctgcccacccctcacacaggctgcactcctgtcacctcgggaccttgcacttgctctttcctctgcctggattgctcctcctatctctaggactggctcctctccctgtgccatgcagggcttagctgaaatgtcaccactttaaaaagacttttacgggccactgggcgtcagcatcccccacccccagcctgctgtctcacatccaccctgctctgttttattttccaggactcactgctttgcaaactgcattattgatgcttcgcttccttgtctgttgcctcaaccacaatgcaagttccatgagagaagggatttcatatttctagcactaagtgtctggaacagcatgcttgtgaaagaaagggaggaaagaagataataagaaaaaaagaaaggaaagcagagaggcagaggggaaagaaagagctttatgaagcactgccatccatttgactggtattaatttctgtaatctacgttttcaaaaactaggacctcatctgcctctccctaaatcttctaattataataataacagtgattcatcaggggcaggtctaagttttgtgggaacatacacaattttaaagactctctgctgggcgcagtggctcacgcctgtaatcccagcactttgggaggccgaggcacgtggatcacctgaggttggaagttcgagaccaacctgaccaacatggagaaaccccatctctactaaaaatacaaaaaaaaaaaaaaattagccgggcatggtggcgcatgccgttaatcccagctactcaggaggctaagccaggagaaacgcttgaacccgggaggcggaggttgcagtgagccgagatcgcacctttgcactcctgcctgggaaacaagagcaagactccatctcaaaaataaataaataaaatttaaaataaaaaataaagactctctttaagaatataaaattatcaacataacagcaggtatggaaacgtatgtttatataaaacgagaaaacaaatcacaacacacaataagtgttttagaaattcacatccctttcttcttggatgtccctgggcaatttgccaaaaatgctcaaataggaatgcctcccaaaagtgacctggcctctgctacacacctagaacattctatgcctcccagaaaaaaacccagaagtgacaggggtccaggtatgtaagggtctcagaggctgatacataatttgcttcctaacacattgcctctgtgccttatgatcataaaacgtcatacaccaaccggaccctgtcttcattcatattatctcatttcaccctcacaattgcccagtaagaaacccccactaatttagaaacatccccatttcacagatggaaaaactgcagccgtttgcaattgttctcaacagtgtttatcaatcatgtgtgaaagtgtgttcagtgccaggtgacaaaacccaccttctcaggaaaacacgaacttaacaatgcccccatctccccatccatcttacactttgattccatcttaacaatattcctcattaatcacctattttccaagctgtagctcttttttttttaatttcctgaccacacttctaacatctttatgtttgctttcattacttctgtgtttgcagcagctctaaattcagtttcctcccaagtttcattaacgtgctctttgcttcctcttgcaaatctcaaaggcaggcacactcgatgattttaaagcatgtcttcactacaaaagtgagcgctgagctgggagagaagggaagacagcacatgaggtaccattcctcactgaacaccgcagcccaagtcaaaaccctggcaactccctgtcccgatgaggctgcggggtggagaggggtcataggtaccatttcttgctcatcaggtgcaaattggtacaacttttctgtgacacatttggcaactgctataaaacttaccaatgcatttaccttttggctcagagtaaactccgtcggaaacaccgctcctagaaacatatttctatacgtaaatgtttacatatacactggcacatgtgtaaagaaaggaatacccacgtttattcagtgttgtttctaattcaatgcagtgctgtttctaataatagcacattataaacaatctatggggtcaatcaacagaggaatggtccagtaaatcatggtatagctatataacagaaaattagaaagctgaaaaaaagaagaaataagccctttatattcaaatataaaaggaactataagagaacatattccaagtagaaaaagcaggtacagaataatatgtatacatggatgactttttgtttaaaaaagcaaaagatccatttttaaacttagatgaagaaaaatatcacatgaagggtaaacaagaaaccactaacaatggctacaagttttggttttggaggctttgggaattaggacaggaaaaatatttcctgctacttatctttttatcttttttatatttttggtatacatgactggatgaccttgtcaaaaattaaaattaaaaattcgatggggaaaatagagattgaattattcaacatcctaattcccaaagaacaacatcactggccattactcatcactggaggattgatgtagtatcagaacatcttaaaattcttttcatcatgccaaaatttattaaaactaagaaggtggatcctttcagccacaatttggtgaatcggatgttcttaacaaagaattttttgaaggagagggtggtgctgttttcagctgatgactggttttgtctgccttgaatctttgcccccttcctcttgttacaatatccttcctttgttttcaaaaactgtccctccaccatctggtgacacagatttacctccatcacgtgacaaggtggtcatgtgactcaggctggtatgcaacaggaatcctctgacctcatgcacagtgattggcccaggataggacacatgacccaagcagagccagtcaggacccttcttccaggaaagggaaaggcaggcccttacccccacggagacaatgggcattaaagacacacagcctagaagcttgcagtgagccgagatagcgccaccgcactccatcctgggcaacagagtgagactccggctcaaaaaaaaaaaaaaaaaaaaaaaaaagacacacagcctagagctgccaatggccttctctcttgccacacaggatcaggagggtagagacaattaagaataaacacaataaagagaaatgcagagcccaaaaagggagagaagtggagtccgaatgacagtttgaattcctgcatccagctatacctgaagtagcaccaatccataaattctctacatcgctggggccaagttaaatgagtttatatcacttggaaccaaaagaatcctgactaatatgctcttagccaatgattagcagcattgaggtatgtgttcagttttaaggttggttcaccctgatcaccttaccagcttcttctggattcttcttacaactaaagactatatcaattgttgctacaatcctgctctcattcgtttcacacccttacctacaaagttaacacgacaaatcaatcactactttaaagggattgctctgacaaataagtgctgtcaaaaagaacaaatctcctttgacagtgacagttcttcggggtgaagataaagcacagagtagacaacaaagtcaccatcgtcgcaggctgtgatgttatttattcctatctaattcgtctgaggcccacctacttcagtacttgaggttccacaaacagtttaagagaatgaatgactgaaaacacaccatccagaatcccttccaactaaggaaggtagcatgattggggggttttggcatcaaacagaacccaaattcaagactctgccatgtagcagctgtgtgtctttgatccagccacctaagccttctgcacctcagctctgagctgtagaatgaggatgaaaaatgttcctaactcacaggattgctgtaaagacctgaagaaacgttgcagatgaggagctaagcacgatgccattggtggggttcagaatacgctaccccaaaatgtggcaccttggcatacagagtaagctaaaggaagttgaggaagggcatgtatgggaaaggctcttcgaccttcccctgaagacttcatagaacctaggaaggattttctgacctacccctaaagcagatcatgagaccctcatgagagaggcaccctccctatccctggaggagaggaacattctatctctaagacacagggacacaaagacgaatctgaacaaataggccttactgagtttaccccatgctccttacatttagctcatctgcccttggtcctatcatgtttcttcaccactgtccgctcttcctcaaacccagcataacaaacactcaagtgtaactatttcttcaggtctccttttaaagtttcccacgtcatgtaaaactgatattaaataaatgtgaatggcttgctcttgttaatctcttttattagaggccccagccaatgaacctaagatgaatagagggaaaagataactttcctccactgcaaagtaagtgctcaatatagagtaacaatcaacaccatgtatttgttcagtaacatcaactgatctcatatgagtaaagctcagtggtagatgatgtgaagaatgtaaagtccatcagacatggatcctcccttccaagagcttaccatctactaataagagagctaggactagtatataaatcattacaaataaaataataataataataacccatcttaaccaggcactggagattcaacaacaaataaggtaataatctttgccttaatggagggtatgtttcattggaggggaccagcaataaataatgaagtgtgtaatttaaagttctgataagaagtacaccatgttaggagagcaacaatagggagttttaggtggaagatctacgcacgaaagtgacgtatggagaaagtgcccctcaggggagatatcaggaagaagatggaagacagaaacaggataaggaaggggaggaggccaggcaaggggtgacccccttaaagtcacacgaagagcagcttcagctaaccccacaggcaactctgcaatgcaaattatgcctcagggttgtcccaatctgtggccaacaagccagaaatgtatcattccacaactgcagaccttggcgaaggcccaccctgggagacataaacccaggcacttctggcacttttgggttgtggaccagttgtctccagcagcccagggaaatcctctgagcaaaggagcaggtgtgggtggtgggaagcagaagcccacaaagccagggaggggcactcagagcactagtgggaccccaggacagggaccccaacccaggccacacagcagcacgtgagtggcagatgtgcaagcgaagcttcatctgtatttacagaagctccccatagctcgcattactgcctaagctccgactcctgtcagatcagcggccacattagattctcataggagcacaaaccctattgtgaactgtatatgcacgggatgtaggtcgtgtgctccttatgagaatctaatgcctgatgatctgtcacagtctcccatcacttccagatgtgggttgcaggaaaacgagatcagggctcccactgattctatattatgatgagttgtataaattatttcattgtgtattacaatgtaataatattagaaagtacacaataaatgtaatgcacttgaatcatcccaaaaccatccccccacctcctccagtccatggaaaaattgtcttccatgaaaccagtcccttggaactccgccagtccccctgggggatgtggcggagttccaacagtgtccatgacacatgggctcttagcctcctgttagtgatgggttatcaggagcggcttccctgaggaggtgacgtttcagctgcataggagtagctaggcaaacagcaggggaaattgactgtgagattaattacagggttatttagatgtaaaatgtttgtgaaaggcagtgaacctggggatcttgtaggatgccactcccatctgtgctccgtctgcagccctgacaccgctctctgccgaagccaaagccattagcggtggtgccaggtggtggggctcattgctgcctctggtgacgtgcgctgtaatgggagatcaagggctcttatcaggaagcacttgacagcctcaccgctaaacaactcaaccttcggtggccaatttcattgcttatcacaaatgctcccaaacacagagctcttgcgctctgggctgctgcggcagatcgatgaggaagctccccaactctccaagcccatcaccatggatcatgtctgccagcacaaaagttctaaaagacctccactttcacttccacacgtgttcctaactccggctgagaaaatgagatccaagaagcaagcttgaagagaaactccacgtggatctatctagatcagtgcttctcaacctagaggtggttttggcctgcaggaaacattggcagtgtctggggacatttgtgcttttcaggactgtggggggcaggggtgctcctggcatctagtgggcagtggccagggacactgctagacatcctgtaaggcccaggacagcccccacaacaaagaattatttggcccaaaatggcaataatgccaaggttcagaaaccaaggtctggaacaatagtgtgtggcaaaggtcagctctctaatctacaaactctctttttcttgccaagatcagaaacatgatatatgtaggtcatgatgtttttccgtttttcaagtggcaaaaaaaaccctatgcaagccatcttaagtataaaatgggacttattgtacaaataattgattaggcagggcaaaacccagaggttctaatgatgccatcagaaataatctcagtatctctttctgtctccctcccctctttcttccttccctcccttcctccttccctctctctgttcttttttcctccttcctttttgtcttattctgaagtagcctcgctccttgtggaggctataaagagcaacagcttatgttctgctaaattgataacctcagggcaagagcactccttcctgatacttcatgtcatgatctagcaattggctggattttccaacctaggtgacttgaccacccctgaaccaatcaccatagccaggaatgtagcactgtcattggtcacacctgagtcaggcgtccacctgtagagtcagggtgagtaaacctacccagaaccatggactgagattgggctccaagggaaatagggatgctctacgtgtaattgtttattcaatcctcacatcagccctggaacaaagataatacattgtatccatggacagggaagtcccattgagaagacagcatggcagcatgactgggatgtggtgtcaggagccaggcagcccagggtcagttcccagctctacaactgacgctaggcaatggtgtttggtttccttgtctgcatagtgggaaatggcttgttttgagaatcaaatgagttaatacatataaagggttttaaatcatgcctgggacagacagaaagcccttgataagtgctggtggttgtttctgagaattaacccaagcaatccaaggggtgcttttcacgtaacttatgtaagttttctgttaacttggatcggattttataatcccatccaagtttacagaagaaactgaaatccagaaaaaaaatctgacttctttcagatcatgcaggtctgtggcaaatacaggacaaaagggcccacttgtcctgacccctgtccagggctcttttcactgccccacggaccctttggaagattcagtgcactctaaattccatcagccccaacaggtggccatccaccctggaagccagcccatgttgattttataaactttccatccaccatgacatgctggcctccccaaatataaagcatccccagccgtgataggggttgagagcctcacctttctcagtcaactgggggtcatcctactcccgtggctgcacaagggggaggcggtcacagttttaaggttcattcacacactgctctggctttccggcagcctccttcactctttctcaggctccctggaaacccatcagccccatgatatttattacctgctccttccatttatgagttagtgatggaaaaagagaagctgtgtacttctttcaggcagcatgagaggcagagagaagaaaaggttatggctgtgtttactttacttagtgctgttttccaggctgcctcccaattgacgctcaacagcaatccaatagcatattattaaccaaagagctttctcagataaacaccaaacagctgctataatgacacacgacctaggtggagaggcaaagataaatgctaattttaaaattaaattgctatttccctgcatgtctaagagaatgggaaaagaatgatgggaataagtgataggaagtaatgatgtaaatggaactgggtcgtctctacccatccacaacgaggtcaaagagaaagggctgagactgtcttaagaattaacattattgaacgtttaacacatgccagatatgatgcactgtgatgcactgttgcattgtttcatttaatgcaacaaccctatgtagatataggtgcctttttttttttctgagacggagtcttgctttgttgctcaggctggagtacagtggcgtggtctcggctcactgcaacctctgcctcccgggttcaagcaattctcctgcctcagcctcccgagtagctgggatcccaggtgcatgccaccacacctggctaatttttgtatttttagtagagacggggttcatcatgttggccaggctggtctcgaactcctgaccttgtgatccacccaccttggcctcccaaagtgttgggattacaggcgtgagccactgcaccgggcagatataggtgtctttaggatggatcgtgatatggtttggctgtgtttccactcaaatctcatcttgaattgtagctcccataaccccatgtcatgggagggacctggtgggaggtaactgaatcatgagggcaggttttttccatgctgttcttgtgatagtgaataagtctcatgccatctgatggttttataaagggcagttcccctgcacacactctcttgcctgccaccacgtaagacgtgccttcgcttctcctttgccttccaccatgattgtgaggcctccccaaccatgtggaactgtgagtccattaaacctctttcctttataaattactctgtcttggatatgtctttattagcagcattagaaggaactatacagctctccattctacagttgagaaaactggggctaaaagagatgaagtaattgggacaaagtcataagtggaataagtggagaggccaggatttgaatcctgccagactggctccaaatcccatgagattaagcattatgctaaattacctcctgggcctgtgcagagggctgtagcatttgtcagatttgaaggtatattttgagttaatctgtcacttacctaacaaaatatttaccaagtcccagttgttagccaatgagatgggaatcacaaaacgacctagaacactctcttgcttttttctaagaacagcttacacataaccttccagagggaaatcaggactcttctgaaagaaagactaatacagcacatcagttggaggtccagcattttctttttgggttaccaaggtccattcaaacctggagaccatgtagctcggtggttaggccgttgagagacccaagtttaaactccaggttctcctctcatatgctggatgccatctcagcaaagtgacacaacctctttaagcatttttccttttagcgtaaaatagagaaaataatcatatctaccacttgcggttcttgtaaggattaaacaaagatctttatcattctgctgaagttcgagtttgcctgcaggaattaggctactgacttctaccctgctgttcttaactgtcaaacatagttttgccatcacccaagtgtccctggcctaagcatccctgtagccagtcatggaaatctttttgttgcagcctgtgccctctggtggaacctaaaaccatctgcacccattgctccaaggagatggctcagctcaagcctggtgaagttccacgcacagtgcagctgcacagtggcatcagtggatgctatcatcatcatgaaatccaaactgatttccctactaggaattggaataaggatattgatagggctgtctttctccttcctcaaaactcctcacactggtgggctgagatctcctatagtcaagttacctctgactgtcctaagtctccattcaatacagtagttagtacaaaccctgcccgcagcaataatagccaacatttttagcacataactaatcccaagcactgagctaagcactccataaacataagcccagggaagcctcagcacatcatcacaaagtagagatggttatcatttgcactttacatgtggagatactgaggctcagaaagggcctttctcttgcccccagatcacactcgctggaggtaacagaactggacttcaagccaaagtctgctggctgcagagcctgagatcacagccattctgctaggggtcagagtctgtctgcagcagtgaaggtccatggcagcgtgttcctggctgctgccttcaagtgcccttcagaaaaagtgaaactcactctaagaatctcagaggctgaatcaaaagccccctagtaatattctgtgccctctaggtttctaaatcctgttatcctccagccaagaggcgtggctcaagcatgtctccacctgtgatgattagcatagcctgtcctctgtcgagacccaaagtcaacacttgactacataattgctctattagtctctttgagtcaaaaaagaccagccggtgcggtggctcatgcctgtaataccagcactttgggaggccaaggcgggcggatcacgaggtcaggagattgagaccatcctggcgaacacggtgaaaccccgtctctactaaaaacacaaaaaaattagccaggtgtggtggcgggcccctgtagtcccagctactcgggaggctgaggcaggagaatggcgtgaacccgggaggaggagcttgcagtgagccaagatcgagccactgcactccagcctgggcgacagagcaagactctgtctcaaaaaaaaaaaaaaaagaaagaaaaaagaaaaaagaaaaagacctcaatccagtggattaagagggggaaaatgccagtaataggcacatacaattggaaagttcaggagtagagactgttaaagcaaactaaatatggcctgagaaggactctgtacttctatattcgagtccttgtggacgaactgcaatctagcttagtaagtagacaagactgaaaacctaacttaggagtaggcgcctgtaacaatagctgagtcttggccaatcccagcggtcatacttcaactattcatacactgctgagtgttcagactgtgttcaaataaagcaaacgccaagctgtaaccaatccagccgttctgtacctcatttccgatttctgtacgtcatttccgatttctgtacgtcatttccctttttttctctataaatcttcttccaccatgtggctgcgctggagtctctgtgaatctgctgtgattctgggggcagcccaattcgtgaatcattcattgctcaattaaactcctttaaatttaatttggctgaagtttttcttttattaaggctaactcagagaaggacccaagccctcaaagggctcctgtgacgtctaccccatgctaggtgttggctttattcacaggtatgctttcccttcccaatagcaaaatggctgccaataggccgaggcagacaccctagcagctcagcaatccctgtggaaactgagtttctctgctctgtaatttcagcagccatctcagtttgcactccattggtccacttggagaatcacatgctaatccctgaaccaatcacttcctgcaaccaggaagtatagtcatctgagtgcacagagctggatcatgtgagcagccctgggacctgaggatgggaagctgggaaagcaccatccgagagggcccagacagagacaactggaggtgtggcccctcacatagaaattgagggaaatttcctcaattcttcccagatggaaatcttctgctggcaccagaagcagcagcattagatgccagacagacaagagccacactgtctcttttcttcactctcccaatcaaaggcacatcatgccagatcctctttcccctgactcatttctcctgactttatcctatgatttgcgaagcagcacaatgtagtggacgttgtataactccggggatactttaagagagggaggaggggaagagagagaaatgacttcattcttttcccaaagttttgcggcagctcagaggtctctggtttatggacacacattaaagaatcttttcatgaggactgttttatgtgagaaagccatttgagcaaggaggcacttggctgctccttctaaatgaaagttttcaattagtctgaagaagttaattacatcgttctttaataactgcacttgtgattctacaaatcctctattaattgattcaaccatatgcccccaaactaagaaccagcaaacaggtagaaaaagaccagggaagaagaaaggggggtgagagagtcaaagataaagaagggctgtattatctgctgggtagacaagttataaaggcaagcgtgggagaattcttgaaaattgtgggtggtgagagatttgggaaattcatcctatagatcaaataacctttgcaagctgcttgcaacatacacaatactagcaggatgcactgtgcagcagaatctcaaaaagaaagcaattctatagagcttgatctagacaattaaaaggagctactgaatccaaggtagttttggaagaggctacaaatagcgacttttctgttttgtagagaagatcattaaaggggaagtcagaagccaggaaattccagtcccagctttgaaaaaaagccgctgctccattcacctgaagctcacagttgtagggatatttaacataagcatcaaactggcctgggttcagatcctggctctgctactgcctagccaggtgactctcggcatggcatttcacctctttgagtctcaatttccttatctagtaaatgatagaaataagcttatctatatcacaggggtcttgcaatagttaaatgattaaataatgcatacaaactgttgagcattgttctagaacatgataaggattcagtaaatactcaggattgtgttcgtcggttgttatcctaataatattgtgtaacaaagcactccaaagctcaaggacatccaacaacaagcaccagtctcttacacacacatctgcaggttcgctggaattgagctgggcctggtttcaagatgcaggttgggtccaagtccactccatgtgtctctgatcctccttggacttgtggctactgaggcttgttctactcatagagaacagcaatagctgagtagggaaactccaaccacaggagcaaatttcaagactctgcttacatctgctaactggccattggccaaagcaagccacatagccaaaacgaaaatcaagaaacagggaaatatactccagccatggagctaggagggaggggtttatatttgccaaataattaactaatctagcacaaccattttagttctatttgatgggcacacaaattattgcccagcaagccaggatatgatgagtatcaaatgagaggttgttatagactgacttgagtacctcccagaatttatatgttcaagctctagccctcaatatgactgtgtttagagatgggggtctttaaaaggtaactgaagttaaatgagatcatggtgggatcctaaatggtttggccatttcctcacccaaatctcatcttgaatttactataattcccacttgttgtgggagggacccggtgggagataattaaatcatgggggcagttttctccatactgttctcatggtaatgagtaagtctcatgagagctgatgattttataaggggtttccccttttgcttggctctcatttctctcttgcctgccaccatgtaagatgtgcctttcgccttccaccatgattgtgatgcctccccagccacgtggaactatgaatccattaaacctctttttccttataaattacccagtcttgggtatgtctttatggacagcgtaaaaacggactaatgcgggtctctaattcaataggactatgttcttttaagaagaggaagagacaccagggatgcaggtgcacagagaaaggactgtgggaagacacggcagaaaggcagtcacctgcaagccaaggagaggcctcagcagaaacaagacctgccagcaccttgatcttggatgtcttgccttgttcttggactctgagaaataaatttctgttgtttaagctacccagtctgtggtatttatggcagtctaatcaaactaatacaatagtagagaaaatcaatgctaaaagagcaagaaattgcttagagagagaagaaaacaaacttcacacagaagatgctctctgcttagaggatatgtggtaattcaacagtgaagatggaagtgaggggtagatgacatcctaggtgcaagagatggccttcaccattagttctgaagagggacagaaagacaatagctaacattttgttgtttgcacttggttgcagacactgcattaggctctttacatacttgatcttatttaaccgtcaaaacaaccctaaaaagttgacgtcatcagtatcctacattttaaggagaaagaaacaggtttgagagatgaagattaacccctaaggatgtcacacgacacaatgggaatatgtcagcaacttctgctcagcagctgctgtttgatgaaatctagaaaacaaagttcatggcctgagaataagcacaacaaagtactcctaggaaatattagacagatagtaaaagaaaataagatgtctcctccaaggcagggagaattgtggagaagaaaagaaaaaaaagggagagagaggcaggctgtatcttccctttgcccatttgatgcaataacaatggcagctaataattaccagtagcgtagcatgtgtaaagcactgttcaaaacactgtatataatgtttgtcatttctaatctattggcttaacatgcacagtaactctgaggtaggtattaaagtgtccccatcctgcagatgagaaaacagccacaccgcactcacggtaagcgacactacaagcagtctggatgcagagtacatgctcccaactcctgtgtgttcttctacctctcatactgccgtaatgtatttcaggaagaaattttttttcttgctaaagaattgctgtgatcctacctcttctctatttataaaatagtggcggtccccattgcccttaggatgaagtccccagtcgttaccttggcattaaaggtcatattccatctctctccgtttgacctttctgacttgcatttcactcaaacttgtctgccctctgtatttgggtgagcataatccaacttcaccctctatgtctaaactgggttggcccctctttctctttctccagtcccacacatccacagtggtgagctccattcaatagccacatcctgtgttcatccttccctgatggcccaagtggaagaaattatctgcagcacgcagcttccaactcatttgggggcctctactctccttgctcctcatcctattcaattagtcatcaattacttgagagtggcttagagagagctctgtgctaacaagaagatagcaagaaaagcctgtgcctgttctcatagacttcaccatccagcaaggatctaagagacttgtgcaaatgctcatagcaacaccaaaatgaggtctgtgggaacctctaagcccccagcccactctcccagtagcacacagatgggcctcacagggtcagtggaccccagaattgcaccccacttcatctgttcatgaactgggtgaggtgcccatatatagctctcatcgaatcatattctcattagattcttatccagaagaatttaaccaacttcttgctccttttttcctcccttttccttaagagacaatgcctacgacccttcaggggatcaggggagcatccggggtgataggagatgatgagaatttatcacagggaacttcagaaggaaatctgtaaaacgagccttttacataaaccttataaatcttggggcacatatggttcagtgtcagtgcaagatcaagttcaggaagcatcatttagcttcaaaatgtgattaataccagtttcattatttatttgcatctctccaataatactgaaagagatccaaatgcagtttatattttatttattctcctacccaccccaaagaaaggaaataaagactagattggggccaggtgtagtagctcgtgcctgtaatcacagcactttgggaggccaaggcaggtggatcacttgaagtcaagagttcgaggccagcctggcaacatgtggaagccctgtctctactgaaaatacaaaaattagccaggcgtggtggcgggcacctgtgaatccagctacttaggaggctgaggtatgagaatagcttgaacccgggaggcggaggttgcagtgagccgagatcatgccactgcactccagcatgggtgacaaagcaagactccatctcaaaaaaaaaaaaaaaaaaaagactggattgggaaccaaactgagaacatcttagggaaagagaagagcagaaccaagactggctcatcctggagaaagtgtcgggagagtcatgcgggaggacaggagtgaggagtggacgaaagaatctgcaagaagtctttctgggagctataaattaaaacacttactctgtcctagaaaagagaaacgcatagtagagtctctttttaatttggtctctactgtgtttctgtaattccatctctacgcttaaactgagccacagagggacttgaaatttgtttgaattgcatttttaacccctggagcctgtcggggactgtggcaagcagcaggaatgcagtttgactgcccttaaataacctagcagggagtgaaggaagctgcaggtttcagtgtgatttagtaggtggtaaaagcctcagttagccaaacccaaggagtttgtgggcccagctctgcgtggccactatggtccaatggtgcatgcaccaaactgtatctaagacatcggatttcatagccgtgaaggtccacttcctccaagaagccttcctagactaacccagcccttacaaccaaatatcccctgatgttctcagcactgatacgacgaagctgagtctgattcacatttttacatcctctgtccccagtgacactgccagctcctggaggcagaatccacttcacaccacacattctgcctccctcactgacacactcagccctcatcctatcagagaaagtactcatcagtccatctcagttgtcagcaacttcccaccccccatgccactccccacttccctgcataaagagccaaactctgccacgtcaggtgagcactcaggctcagagagactcctggaagagtgcttacctgaaggctcacggtggttttgtgtgggtgaagtgggggctgtggtttcagatcacactttctgatgaatgtattaaaacccaaccatcatgtgctaagcgggtccctaaatctaagcacattgaatgtgggctgaagttcccacacagtcaatgagacccagggagcatcggcacctgcccatgggagtccacagacactccaggtgccactgtttcgagttcctgctgccccaggtactacctggcagcaggaacctcctctggggaaataactctgtggatgactctgggctttggagaagactcgtcttaccaggaatttggaactctccctgccagctggctcacacttcaggaaaacagagccaggagcattctggtagcactgggcccctccctctgcctccctgtttctcaggatggggaagctttggcgggggtcacccacctttttttgcaaagtggccacatttccctcctctcctgaaaaggtcaaactgttgagcctaactatatttaagaacagcgtagaggaaaagagactcaatcagcaattgggtcatattaccatccatgatgtttcaggagatgttttctcgcgttctattgtattatattatttgactttttttttttttttttttttgagacggagtctcgctctgtcacccaggctggagtgcagcagcatgatctcagctcactgcaagctctgactcccaggttcacgccattctgcctcagcctcccaagtagctgggactacaggcgcctgccaccacgcccagctaattttttgtatttttttttttttagtacagatggagtttcaccgtggtctcaatctcctgacctcgtgatccacccgccttggcctcccaaagttatttgacattttataataggcatgggtttttaataatcagaataaaacagcagttagcattttgaaaattaagaaaaaagcaaaggacactttcttttttattttcccactaatgtggatgagggggaggggtctttaaaaaatgtcttccaacagagtaaaatttcacttacactttttcctcactagaagtgtgaaagctaataaatgttttaagttctaggcattgcttctttcacgtctgctttcttttttcaaatgctgcatttctttgatgtctcaggtaggccagggtcatgttttgaaacctcaacacccccatactaaataactgaccttagtaaacagacctcacacgttattcccaccagaatgattacgatggaaaagacagaaaatgccaagtgccactgagaacttggagcacctggaactttcaaatgctgatgttgcgggtatcaattcatactgctttggaaagctgtctttggtagcatgtgctaccttaggacccaggaactatgcaactttccccaaagacatggagtaggatattctttgcagtactacaataaccaaaaactagaaacttctcgactgtgcctcagtgataaaatacatcattgcatatccacacaatggaatagtataccacaatgaaaagaaattacaactatactcaacaatacagatgaatctcacaaacaatattgagagaaagaagccgactcaaagagcccgtgctgtttgtattcattaacataatgtacaaagacaggctaaactaatcaccttcagagacaaaagtgaggaacgtggtgacctttggtgggactaggggaggagtgactgcaaagagatctttgggttgatggaacagaggcaatggtgtcaagttctgtttcttgacattaatgcttgttacttgggtgtttcagcatgtaaaaatctgagctgtgcgcttttgctttaggcactgtgatatgcatattatagtcaaaaagttttttaaagtagatatctgttcctatgaaggattaggttttaataaatataactcacttagtgaccttttcaccaaaaaatagcggattaggttttaataaatataactcacttagtgactttttcaccaaaaaatagcaaaggagaaaaaagtgaacctgcaggttgaaaacagaaagtttacagatgaaaagagaaaaatctgattgtatgcccctcccacaatcttacccaaaaccaaatgcatattttagaatcaacagatttcttatcaagaggaaatatttcgttgtccaaggcgaaagagtctttgttttcttaagacagggtctcgctctgttacccaggctggattcagtggcgcgatttcggctcactgcagcctcaacctcctgggctcaagcgatcctcctgcctcaccctcccaagtagctgggactacaggcacatgatatcacacctggctaatctttgtatttttcatagagagggggttttgctatgttgcccagactagtcttgaactcctgagctcaagtgatcctcctgcctcagcctcccaaaatgctgggattacaggtgtgagccaccacacccagcccaaaagagtctatgtgcagatcttattctatgtgcagatcagtttgaagatctttaaacatagctggttttcaatcctctgcctgcattgtttaaaataaaaggtgtgttttctggcatcttttttaaaaaggccaagaggggcatgctgtcatttgacctaattttgatctgtttcatttaagaaatatatttatgcacaggggattggattgcctatagaatgaggtcatttcttgtgtgtcatatgctgaagcaagtgaaaggagaggcaggtgacatctataaattttagtcacacacttccttccatttcacccaggatggttctctagtcactaagcaggtgaacactgacacccagtgcgagcaatgggaacaaagctttcttggtacctgcttctaataaaaattctgtgcttggatttactggaaataacttagaaggtacatttttgaaaaaattgatggggaaattgatttaaaaattggtacaggatataagaacacaaacaaaaataaaagtttcaaatgccaagtaaatatatatataaatatgttcagcatcaccagtgaaaaggaaatgaaaccagaaattaaataccatgtcacctatcaaattggaaacattactgaagtttaataccatctcacccacctgattagaaacatggctaatgtgtaatcatctcaggagccagtttaagcagagggagatctggtggtactcctagaactcacatggcacaggtgggtgggtaaattgtttctgtattttggatgacaatttgatattatcttttaaaatactgaacacacataatccaacaattctcatttcagaattaaccctagacaattgttttaatgtgcacacaagaagacaagttcaatttaggtgatactgtattgctggaaagcaaaaaacaacattcagtgagtaatgggttcatgcccaaaggacatgagccaattcgaaggggtctgcaatgaccaaagttgagccaagtgaaacatcaaagataataatagccataactgattgaaacacagcaagtatatacaaataaattagtccatattgatacacaagaagaaggccagccaaacgaaaattaaactcctctgccactattggagacaactatggttttactctttactccaaaaattgataattaatgagaaaggactaagcatttatcctacatttctagcaggagctgcactttagggtaagcctataagctcagcagttgaaagaaagctcccctttacaggagaatgtcagctaatcaatgtagagtataggacagaatgtgaaaatcaaaatcttgcaaactccaaaagaaatagttgattgagataagaatcagcaattaggggaagtgatggaaaactagacacgtgcatggtgtcgacagatcctgccacagattattttctatgtgctagaaggaatatgtaactttgtaatgcagaaatgtgactgtcctagtcttaagccagtaatcaatattggcatcaccattggtgggataaccagacattatgtgttttctgttgtaattgcaatgtggagtatacctaccaaatattcttgccaaaattttaccctaaatttattcaagcatctagatacaacattcagaaaacaacagaacaataaggtaatacaggaacaaatgaagcaccatcaagaggaaccaattccaaaatccaaaagctaggatattctacaggacatgggtattttattgctgttttctacttttacatctacttaattttaaaatttgtttacgttttattttacattcttagattttggcatctcattagatgaacataattactatgcctctagcagataaggccctacaggatagtggtctaaaatttgtatctcatgaactggtaacatttccaaacctcacccccaaataatggcaaggatagttgcaaatagcacaaattcctatcttattaagtaaaaaaaaaattatcacttattggtgttatcttttcatacaagataggatcttttattaccaaaatgtacagatgaatgaatataatcccaaaatggagaagagtcctttacacagaataagatttatgaagatgccctagatcatctgaatacatttgaggaaacaactaaactcaggcagctggggcttggttaacttgccttgcttctggcatgaagtattagaatgggatgcattgctgggtggaattcagacttcaggtcttctcatcttatgggtacaaaaagagcaccattgccaagtatgttaacagatgattatatttgacaaccaaaattccaagcccccattgaacttgaatgacatgtgcatgctgtcgacagatccttccacagattactttctatgtgctagaaggaatatgtaactttgtaatgcagaaatgtgactgccctagtcttaagccagtaatcaatattggcatctccaatagtgggacaaccagcttcctaaggttataggattttgaggtacaacttcctaagactgggtaattgataaacaattacccagtcttaggagtctataccccagaatcctatagcccagaggctaagaaatggctgaagtttattcacagagttctaagtcttcctgatgcagagatgggaccaatcaattaggaagagagtgtcatgtggtgggtaagaccatgggccttgggtcagtcagatctgaatgtgaattcagctctaccagtttggcacttaaatagtctctaaatgtcaatgtcataacctgtacaataggtaacataactgtctatgtcagagatatggggatcaaatgggataatgcagatacactactcagcacagaaccactaaacttgttcatgggttaaacaataaataatagctaatgttactatacttttatcctgataccaaattttcaaagccagtggtactttttcagctggaagatgaaggcctaatcaagatggagccaagggcagggccaagctgatgttagcatcccaagcacttggaggtttcttctcacccaagacaccagatacggatgcccaggtaagaaagcacttactttggggtaactgtgggctggagttacagaggggagaaaagcacagagtctgccaaagccagggaagaaagaccggggtggggcatgtggcttgatgcactgcacagaataccgtacagggcacagaccgatcccactttgaggcttgtgccttctcaacacagagatccccttcctttgtgagtcccacctggccaccaatgcatggaatctttctgagactatcaatcaagtttccttgcctttctctcaccaagaggtgggtgagtgacaccgactacagccaaggagtctctgtttctctcagctcttgagtcaaatgacccaacggcagaaaacagagcccatagatcctgataaggcagaatcctgaagcattggtccctgctaactgtacacccatagctgcctgggacccattctgtccaaaacaaaggtcctatagagtttccttttattctaggaacaccacacattatgatttggatctgtgtccccaccaaatctgttgaattgtaatccttaacgtgggaggtggggcctggtgggagatgattgaatcataggggtggtttctcctgaatggtctaacattatcccccttggtactgtcatcatgatggtgagtgtgttcgcatggggtctggttgtttaaaagtgtgtagcacctcccacttctctccttcttgctcctgttcccacaatgtgaaatgcctcactccccatttgccttccaccatgattgtaagtttcctggggtctgcccagaagccaagaagatgacaacatcatgcttcctttacagcgtgcaaaactgtgagccaattaaacctcttttctttataaattacccagtcttaggtatttctttatagtagtgcaagaatggattaatccactccataaccctcagataccttcctaccatgcataaattaccccagattggtccccattgcttgcaacccaagaattccaaatgaaacagttctcctctccccactgactctgctgcaggtccaggcaccatcaacagcctctttcctgcttctattcatgatgctggttatccgtagatgacacagtaaatggttttgagtgaatgtctactaggcaccaagctctgcgctcagctgtcaggagcagcaggaaacatgatagctgccccccaaagtcactggcacaggcaatgaccaaacaaagggacgcatgctcagatgatagggtgctggggacatacaggacagaatccctccctttaaacatgacacctgggtgtcatgaggatcccattctccagactttccccagtgactgggaacatacatcaggatgcagcatgtgatttcagaagtgctattggaacaagttttcccagcaaggtgttttgctcctttttctcaggtttttccatcaagagtctcttaaggccccagcgcggtggctcacgcctgtaaacccagcactttgggaggccgaggcaggtggatcacctgaggtcaggagttcaagaccagcctggccaacatggtgaaaccctgtctctactaaaaatacaaatattagccgggtgcagtggcacgtgcctgtaatcccacctattcaggaggctgaggcaggagaattgcttgagcccaggaggcagaggttgcagtcagccaagatggcaccattgcactttagcctgagtgatagagcaagactctgtctacaaaaaaaaaaaaaaaagtgtctcttaaactacattttcataggccttttcactgcagaggtaacaaactcaaatgccaactggggccagctaggtatcttagtcatttgacacagacacattttgtatattaaacacataggaatattttccccttcaataaaagatatgctccctaacacttgttttttttttaaacctatgtcctcttcttctaccttttgttttcaaactttttatgaagacatagataaagaatgatatcactttcctcttaattctatgaagaaaataaatgtaagtaaaatattaaagaatgacgttggtcctccctgttctagatactgtaaggcatggtggggatttatggcaaactggagagctcctgtcctgaatgaaagggaaactttaataccagctagagctatgaattgtatgcaggaaatcaagttcccaaaaaatctcttttctgacagaaaccagaaatccagatttttatgcaaacgtatctgatttttaaatgttggcaaacaattcaaagcttcatttttttaatgccatgcaggcctacgctctgtagtttaaacaaacaagtatgggccacattctgcccttgggacatgaattttcaaccccttatgggtacagtactgcccagggtggcccctggcctagttctggcatatttgtgcaaataagataaaagtgttccttcccccacagatattttactgccattcatcagaaaaattgtcctaacaaatatattatacaaatccaagacactcattgtaagcatggtgccctctggagttggacagtgtgaaacctatacacctgtacacagcagccctgttttcatcctctttgagcttttcgggataagcccctaaaatcccacctaccatctaattttttattctctaattatgtttctgctaatatttgacattatatttatacctgaaagacaaattggagactgaattacattatcctatcagggcaagtccagtaactgagattaaagaagattcaagtgggctttttggcacaaatcttagcccctgtcttcactttgcgacacgtgactctgtgagccacatctgcctgcgacaggataatctatgccaagtcttctgaatcctttcactttctagaaatagatggatgttattgtttacagacggaatttccattgtataaaaccaccttatcccagctatcaattattgtcattatctgtaactaggcaagttccttacaatgtttgctgaaactatctcagatcagtaattaactccccagccaccagctcttgcctttcacattttaatgaggagcgtgaccatgaagccattagaatgtgaaaaatgaaagttatcaccagttatccttctttgatacaacagactcatttcctctcctctgctgatagaggatcaacaaatactttttccatttttttttaagtaggaagcctttagaggccaacctacttagtgtaaaaagactaccagccaccccctgaggcagaaagcacattgcagagattcagttgtttttttccctctggcaaaatgccttgttaattaagaagcacacctgcataatttaaacacatcgaagccggagtctagccaagtgtgcagctgactgtctcccctaattgcccacgctcaccagcacccaccctcattaataacgaaaaggctgtcctctctcaggggtgctcaccaacaattcccaaagagtcagagaagtgactgggccagaaggtggcaccaaatcctgtctcattttgatgtcagccaaatgagaaagctcatctccttacggaaaggagattttgcagacaggaaggaagtctggagtggagggtttgcacgctggttagacattaaatgactttccagacaaatctggttttccttcatgcagaggaaactccattaggaatgtttctacatttaagaggaatcccagagctcaaaagaaaacttggtcaaatatttggggctgctctcagtaaaacgaattgatgcccctccaaggaacgtttcataagctggagtttacccttccagtctggtcggcacagctcagaagcaatgggaaatggcaattagcacaaggcaaatagtggcggatgagaccaagccaccaaatggcccttcgaatgccgtattccaatgtgacaggacagaatgaggcaatggagtgagcaccagacaaggagccagagacttgggttcgagaagtggctctcccgtaggtcattccagaacctcaaatcatttcctgcacagaagtttgcagtggagcagccctgatacgcgacaggtgagggatgacgttggcgtgaacgtggtgaaaaggaaacgcttttacactgctgttgggaatgtaaattgctacaaacactatggaaaaccgtatggcgattccttattcgattcagcaatcccactactgggtatctacccagaagaaaagaagtccaatatgaaaaagacacaggcacatgcatgtttatagcacaattcacaattgcaaagatatggaaccaacctaaatgctcatcgaccaacgagtggataaagaaaatgtggtataggccaggggcggtggctcacgcctgtaatcccagcactttgggaggccgaggcgggtggatcacctgaggtcgggagtttgggaccagcctgaccaacatggagaaaccctgtctctactaaaaatacaaaaaaattagccgggcgtagtggcgggcgcctgtagtcccagctacttgggaggctgaggcgggagaatggcgtgaacccgggaggcggagcttgcagtgagccgagatcccgccactgcactccagcctgggcgacagagcgagactccgtctcaaaaaaaaaaaaaaaaaaaaaaaaaaatttgccgggcatggtggtgcatgcctataatcccagctacttgggagactgaggtagaagaatcacttgaacccagaaggcagagtttgcggtgagctgagctcgtgccattgtactccagcctaggcaacaagagcaaaactccatctcaaaaaaaaaaaaaaaacagaaagaaaatgtggtatgtatacaccatggaatactactcagccataaaacggaatggaataatggcctctgcagcaacttggatggtgctggaggccattattctaagttaagtaactcaagagtgaaaaaataaatatacacattctcacttataagtgggagctaagctatgaggatgcaaaaacatagtgatatagtgaactctggggactcggggggaagggtgagagaggggtgagagataaaagactacatactgggtacagtgtgcactgcttcagagacgggtactccaaaatcccagaagtcaccactaaagaaattatccatgtaaccaaaaaccacctgtacccccaaaaactattgaaattaaatttgtttaaaagatgtagcaatatatgttgggaaagaaaaaaaaaggacagtgtcaggggtctccaatgcctgggatcaaatcctatctctgatgcgtttgaggcaggtgactttgggcacgttacctcatctttctgtacctcagtcacctcttcagcatcctcatggggtggttgtgaatattaaatgagattatgtccatagtgctgtcaataaatggtaatggttattcttaagaatgagctaaaggaaaactaattggaaataaacttactggggacagacctttatcagtggctggaggccctgtatcaggacaagggctaagttggaattgttgtcatgaccccattagacccacatgttggagaggtctaggaaaaatccggtcagtttacctagtgttgactatttacagatttacgttacaattacattaaatgtttatatacatcatctcatttactttaaacagaacatctgtgagtcaggaatttaagcctcagagagtttaagcaacttccccaaggtcacacagtccctttgtaacttgaatctacatcttttgtaggcaacaaaagtagaaatgggattacaggtgcacaccaccatgcctggctaatttttgtatttttagtagagacagggtttcaccatgttggccaggctggtctcaaactgctgacatcagacgatccacccacctcggcctcccaaagtgctgggattacaggcatgagccaccacacccagaagctactcaggaggctgaggcagaagaatcgcttgaacccaggaggcgaggttgcagtgaacatgagatcacgccactgcactccagcctgggtgacagagtgagattcctactcaaaaataaataaataaaaataaaaatggagattttgttattatagcatctagtatggggtctggcacatagagaaaaaaataacgaattggcttggattgaatcgatgtttgtagtaaccttttttgccacagagtaggagagaagatgatatgtcacagtggtgagctccttccagaaccttccatgggaaaacagaagccttccaacaggggcaagaaatgcccaggagcccagtgcccaggatctgagtccagatgcctcaggagcccagctcccccgcttctctgacccttacaaagcaggagaggggaagaccagagccctgcatgggttgagggggcactggaagtgtgagagcttgtgccagctgctaatttggaacaaaggccaaagactggctccccagagctccctacaccaacatgggctggcttccactgggaaaaatggaggtaacccacattcgggcagagacgaaactaagcgtgccccccaaattatcctctgctttcacgtgatttaaaagagatccagacatttctgttttccctcagcaagacacacacaagcagctgagaggtgggggccctggagtccaccatcacattgtcaatgtgaaggccaaggttaacttgtaacagaggttacaagttatgacatatgacaagtggatgaacgaggcatgaattacacagggaaagctgagaacgctgaaaaaaggcagagccagcaggaggacgggaagggaccactgtgccctgggaacccatgtcaccctcgacatttcaacaatggctgctcaaagacagagaccagcaagatggctccatctcagccagaggtcacggaagcctgtataggaggacaatgcgtgagccagggacccccagcccaggtggatccaggaacttccttggaagccatcttgagaagaaaggcagaagggagaccatttagaggacagcaacagccctaataaatgggctgggactttaaggtgactagacaatcactctaaaagatattgtttatcccgagtgaccttcaaagacatggttcagtttgatgtgccattagaaatggaagctcttggcaagagttgttcagttattaaaaagtagaattatacttgtatgtatctgacaaagtttataaatcttgcaccttctcttttgatatttttcaaaaatacgtcataaattgtaaaaatatctaataactttcatcaatatcaaaacatgcaagcctacggtatttttttttttttccacagactgttggtatctacagaccacagtcagggaatcgctgctttggtctgctcttacaatcttggtctgagacctagtgaccctggcttaatatcttgctcaaccttaccacttttctctcctttctcttctctcttcttcaacagccgttcactttgcaaaccctctgcggcctgctgtccttactctcctgtagggccatgaactccccaggatgtgccttcctgtcttcatgtctcctggcctgatgggcctcctgcctgtgtcttgccaacatggaggtcaggcacagaaactccagcctatcaactcaggtgcttctctggtagtagcaacttggggtccttgacattttgttttgtcctaaagagaacaaaatgctccctacttcttccactgtgtcttgatccctgtcaatttactgggacacacacccctccccaaggacagaggaaaaaatattgtgatgtccaaatactcagagagtgacatacgaagatgtcagaatgagactttcactctcagttttggtggcggccctaaaagaccagtgacagacaccacgtatcaaatatagcagctctgtacaatgaataaacaaagccctttgcccaattcctacttcaggcatgaaaagcccaagagaaacagctatacctttagaaaatggttctggggttcgggtgcattttctaacactgccccagagaagcctccaagagaaacaataagggaactagtcagattgctgtccaaagttctctggagtttgtgggtcctgaaacgggtagggcccaagatgagagctgtgtctgcctggatatcagggcaaggagctagggcagcagagggagctgcactcctactgccttgggtggcaacaatgtctatttcccaagagccatggggtccccacagaggacgtggcaccatcttgaaggatccctgttcaacagtgtggcttgcagggcaaagagacacagcaggagtgggaactgaaacatgggggtcaccagcacaagtctgagtgcaaccttcatatcaggggactgtgcagcatcctagagcatccaaagaccctcaaatgtaaccccaaagaaacactttcaaatataagcaaattccagagaccaagaattcattagtattagtttcctattgcttctgcaacaagttaccacacactccttggcttaacacgcaaaatttattatcttttacaaaatgagatgagatcaaggtaccagcagggctgagcgtccttctggaggctccagtgggaagtccatttccttgccttttccagcttctagatacgctgtcttcaaagccaacacgcagcatccctctgccctgtttccatcatcacatctctttctctcttctgcctcctttttctacttttaaggaccactgtgatttggttgagcccacctatatattccaggctaatctctcaattttaattccatctccatcctgtattgcctttgccgtgtggtccaaaggattagatcaaggacatatttgggggtcgttatgcatccactcataccctcaagatatcttcagtactcatgcacatctcttgctcctcttggctctgaaggcccttcctgaaactaaaacccagccctcttaaaatcgagttctttctgttaccatctgacctttgcagttgttctctccagtgcttttcttttctgctaccagtgttctttcttcgaaaattggcctccaactcacagatctaattttttttttaggtaccacctcacctgctcacataggacctccaggtttgcctgcaaaaccaaccaccttcaaccgtaactatgtctaggcgtccttgaaggactctgagaaaatatttctatgttcttttacagcctccaacttaaaaaaagccactgtcctttgtggagggtctcctcactgccatggtggctggtgtcctccaagaaaagccaattatcttttttttttttttttgagatggagtcatgctgtgtcacccagccggagtgcagtggcgtgatctctgctcactgcaacctccacctcctgggatgaatcaattctcctttctcagcctccagagtagctgggactacaggcacacgccaccacgcccagctaatttttgtattcttagtagagacagggtttcaccatattggtcagactggtctcaaactcctgacctcaggtgatccacccacctcagcctccaaaagtgctcggattacaagcatgagccaccacgcctggccaaacccattatcttttacagtgggatgatcaaccctgctgattcttcacggatcacagcagcagccctacaagtacaagagggaagaacacctgccccaactcagcactgcccctggccatctgaattccaaagcagcactgcaagaaccctgcaacacacgaaatcttggagaaacagctcaccaagcccctggctgtgcccttcagcatctaagctgtaaattattgcaagaggcagggccaggtaggacgctgatctcaagctgtcctcctattgtagcctccctcttttttcttttttctcaggggaggctctagatcactcttctcttctcctgaagccgaagagaaaaagccagctcaaaaagaaatccttcatgcatatcaactgtttcatgcttggacccatacaaaagggtccctgctgtcttccccacagtctctgcttgtcacataaataaataataagtaaataaataaatcaccatcatcaccgggtggctgagcgagttatgttgcccaggctctgctgctcagcaccacatactgcgaatagtcaccctaaacactcactctgtggctaacactgctcaggcccctgggaaatgcttctcctcatcacttgccttggtccttggttacaaaggcaactgtgtccaaacaccacgaagggttgggggttgtatagcctcacaggtggaatatagacaggatttgagtgacagaaatgtttaggtaagagaaaagagaagttaatgaacgtgtacaatcctcattttttaataaggagacatcaaagggtcattatatgtcaagcattcattttcttgcatctgtctttcaatttgtggttccagataaactcattgtgttattcagagttctctagagaaacagaaccaatagaatgtggatagagttagagatagagatagagatagagatagagatagagatagagatagagatagaaatggaaatagagatagatagatagagatggaaatagagataagatagagatagacatagagatagagatggagagatatctagaaagagatttattataaggtattggctcccacgagtatggaggctgaaaagtcccatcatctgctgtttgcaagctggagatacaggaaagctagtggcgtagttctaagacctgagggctgaaaacccatggtgtagattccagtccagatctgaaggcctcagggccagcagtgccgagggcagcaggagaatggtgttccagctcaagcagccaggcagaggagttcaaccttcctgcccctttctgttcttttcaggccctcaagaacttggatggtgcccacccacatgaggcagggtcatgtgctctactcagtccacctcttcgaatgctaatctcttccagaaacaccctcacagacacacccagaaatcatgtttaaccagctatctgtgcacctcacgatccaatgaatttgacgcgtgaaactaaccatcacactcatcaattagcatggtaaccataagtgcaatgatggtggctgaaaaatagttggcaacctgggctatctcacaggattcaaactagcctgtgtgcccatacatgtgtgtgtccagacaaaacttgagtgaaacagtattcctctccttaacactggtaacagatggacactgaacccaagaactagaaataaatatacatgtaaatacttaaggttatataaaaatatttaattaaaatatcattaaattctcaaattgaaaatgtcaactttaaataattttgtttaaaattatattcattcattctcattttgatgttgattttactttaaatagacactttttgcttatttcaatttatcattttgtgaaaatgtattcaacttttgtacacttcattttacaaatacttttaaaccttctttccatggcttctcaaaatgtggtgcgtggccagtctgtattctttgttaccagcagggtgtggaagatgactcagaaattgagagtgggcatctatcatatgtattctatgtcatcatccactggaaaccacttagagataagtctcttccactgcgggcctgtggccacatgttgaatagccctgcatatcattactgtcagtgaaacataaattatgtgaaaatcttgatttcaacaacataattactagtttgactgaaaataatgcaacaataaattttgtagcataaatatgaattctaatttaggaatttcatctatcttttccttattattcaatcccaaatattgcccatccacattgggcaggaattcctggttctctttctgtgcctttgttgtacccagaccaaggagagagtcaagagccgagtccaccccacacttacctttcctcacttcagagccaccctagcactctccatggcaattaaaaaaaaaaaaaaatcccattgcaaaacagtatcatccctgtgtccctggttcagatacatggcacaatctctgtttctgaaaaaggcagaacaattctctattacagactttgggctctgaatcacaggtaaaaaacctggatgtaaaaacaaaacacagagtggttgccatgcatttggagctatatcgatgacccaatacagctgaaccccacattctcctgctgtcctcacacactagttatctgcggtccagggctgccacatgtcagaacagaaagaagctggatcctgtcttgttcccagcaagacagatgtgaggagcatgcagtgaagagggcagggaatgaggaactatggccaaagcacgctcaaatggcactaggacttcatatctacttttgtttatttaataaactttcccattctggaaacaagaatccagggttgtaattcttagttgttaattcataaggagtaaaactgacttacacacctgaaatagtaggaggcatggcaggctcaaagagcaaggctcaaaattccaccttttaaaaagcaacatgcaagttcttttctgaggttgacctccttggtagataaccaagtgcctcagccaggatccaggttcccagcagtcactgaaaggccaagtctgtgctcctccaaaggggaaccatcccaactcatctcccttggtcaccttagcacatacaccaggacaaatctatttttcttttcaggtgttgaaataaagtttgttcttatggtccagctagacccagagcaggaacctcttagggttctttgtaataagtggatcagagtctaaccagacaggaatactgacagccccttcacacagcaggagctttacaaatgctgcaatatttgttcataagcatgtttatcacaaacaggaacagactattcagaggaatcaccattactgcaaataaccaaacattgatacctcatttcatcaccattagcattctccactacgttaataatcacaaaatttcagcccagaacatcaagggaagaagccaccaagcagcatctaaaataataacaactgatcactgtactcatcaaaatccagaataccaaggatgtctttttgaaagtgtctcaggcatttgacttcagaacatctcagtagaaaatgttgcagagtgacattgaacagaatgatgagggaggcaaggagatgctattcattctcacaaatggagtctcattttactccttctcattcaatattcttaacagagacatttccatctgttgcatttaggaaaccattccaaattatcctaatttgttgctggtaggtgctaatcatacatgagctgagttcctcctacctttcagaggataatactgaattgtttaactgtaatgtaattcattttctacctttggcctcatcttcaagcaatgtacttgcataagtttccttctagttgagtgagggaagactaagataatctatacctctactactctacccttagtcaccccaataatcatggctacctcttggagaagtcgatgtagcaacagctctgaaggggtaggggtggggatgggagggtaatggttaaaaacacaggctttggagtcagagatatgaatttgatctcaacctgttctgtgactttggttgttatttaacctcactagccacagctttctctaaaataaagataatattcttctgcaattaactgaaataacaaaagagatctgatgtttttataccttaagtgtatctattagtctctgttaaatgaggacaatagtaaaatatatctcaaaattcaataacgtagttttggcaaatgtgtgtgtaaatatagagagaaagtggcttcactggtctcctgctgcatcatgcaggatgagcgtgagtgagaagctagcatcctggaaacagggaggagcagcatctttggagactagttcaaagccgtcacttcctaagatgctattaggttggtgcaaaagaaatcacagtttttgccgttacttataatgacaaaaaaatgcaattacttttatgccaacctaatagaaagccaaagccatttactggggaggaaagagaatgctttacataataagtttggagccttctgaaagggaacaacacctgacacatagtgagcgagaccaaagtgatcccacttctagcccagccagggaaaagcaatgaggggaagacagaactggggttcttaagcctgaggaaagggggaatatagattactccagtccagacttctccatctcagttattggcaactccacatttttagttgcttgggcaacacacctcggggtcatctctgactcttttctttctctcccactccacaaccaatctgtcaggcatctggtggccatatctggaatccaatcacttcttgtggtcagcataattccacccctgccacacatacatccaatctctggaacctgtacatatgccacattacccagaaaaaagaaaaggacttggcatatgtaattaaggttatggaccttaacataaggagattatcttggattattcaggtggacccaaaaatctaataacatgagcccttaaaaacacgtaattttctccagctggaggtagagagatgtggcaaaaggagaaggcaaagggatttgaaacatgggaaggacatggctcactgttgctggcttaaagatgaagggagacatgtgacgaggcatgcctgtgtccttaaggagctgagagaggttcccactgacggctggcaaggaagcagagatttgagccctacagccacaaggaactgagttctgccaatgacttgaaagagtttggaagtacattcttccctagagcctccaaaaaataaatggacctgtcaacactttaattttggccttttgagattccaagccgaagatcctgtgagctatgctgtgctggacttctcatttacagaactgtgacatcatacatggatgttgttctaagacactaggttcatgataacatattatggcagcaatagcatgctccctccactggtaccatccagctccaagacaccatcataatcacccagatgactgcaagagtctcctcactggtcgctctgctctggccttgcctgcctgcccttcagtttatcctcaatatcacagcaagagtgagatttttaaggcctaagtcaaattatgtcactcgtctgctcaataccctgcagcaactttccatctcactcaggctaaatgacaaaatctttgcagtgactaaagaccctactagatctgctctccatcttaccagctctttgaccttcaacttcaactgcttttctctttgttcattttactcaagattcctgacattattgctgtccctagaacatgctgggcatgctccaatcttcaggtctctgcactatctgtcccccaacacatctgcatagcaaacctttacctcattcaagaagactggctactctgtttagcactgaaactgccttctctctctcccaactggcactcccaatctcttataccctgctatattatttttctccataatacttaacgttttccaacatactttttatttacttatgtttcttgtcttcttgtagaatgctattatggtaagagttgggatctttgctaatttttttttttttttagagatgaggtcttgctatgttgtccaggctggcctcagactcctgacctcaagtgatcctcctgcctcagtctctcaaagttctgggattacaagcatgagccaccacagcctgcagtcctttgctttgttcactgatatataccccaaatgactagaactaccaggcctttgtgaacgaatgaatggtaatctgtgttctactcaagagcttgttcttgtgtggggagagcaagttgtatagctttgtagctcatgctgtgcatttttcatataaagtaaagactgtcaactcgggaagctaaacaaagagcactttgatgatgcagggacctagactataagggcactgtttcaacagtgcgtccgccaaactgtaccagacttgtcttcaacagtgacaccatgtggcagctaaaagcaactgcagtggtggactgatgtgactccagtcctgccctctttgggttaagtaagctgcaaggactctgccaatggcagggagtgagagagagtgagagtgtcaatgggaggtgctagaactactgctaagaagccagagaggagggctccagcaattgattagagaatcagtgagatataatggcacatgtaggctacattagtggaattactaatactaactcaggtaaaaagcacttcacatggtaatgggaacatagtgagagagtgctcaatggtgactaacattcagaagggaggaaacaggagaagaataatttttaaaatgtaatttgtagtgggctgagtggcagcccttaaaaagatatgtccactgaacacaatgtcctccaaatattggctatcctcatcctaacccccagaatctgtgaatgtgactttatttggaaacagagtttttgtagatataactaaggatctcaaaatgagattatcctggattgtctggataaattcagcggcagtgtccttataagagacagaagacaaaacactgaaaagagaggaaggctgtgtgaagacagaggcggagactgaagtgaagcggccaaaggacacctgagccatgagacactagaagaggcagggaaggattctcctagagcttccacaaaaagcatggcctgccagtaccttgatctcagacttctgacctcagaactacgagagaataaatttatgtggttttaagccagtttgtgggaatttgttacaggtaccccaggaaagtaatccacaatcctatagagattatcctacatcatggggagagggaggaaggtataagtgaggtaaggtgacagtttacttattgggcagggggtactgattaaactaccctaatgctgataataaccagccttgaccataggaaatttactcgaattatttttacaacatactagtcacccaccttccttcctagttgaggagatccaagaccccctggtggccatcaagcagaccatccagggcaaagttccttatctgatgaattcagaagtaattagactttcctattagctaaatgcctgctttagctaatggctccaggcttctttccccaaaatttagaagtaactagaatttctatacatctccagaatgcatgcatgtcaacccttgctgacattaaggtaccaaagcaactacaagtgtaagcatttatcatgacctatgtggctaatatggtccaaattaccctgaagttcccgctttaaggttcataaatagcccaaaggaaaatccaccacggcacactcagtcctgtcttgctgaagtgctctgctgcatgctgctacagcgctttctatctaatgaaactttcctttcaaacccacactgttgtcagtaaattcttcttactacctgtgagtcaattcatttctgatgccagggctctgatacgttgcctggccatactgacctttcaatattaaacaccaggtacagtaataatgtagcaaatgtgttgctgtattttcataattcatggcaggctgctgcccactgttgcaaataaggtgatgttggaacacagctgtgcccattctttcaggtgtggtctgtgacagaggtgaccagtcaacagagaccatatgcacaaaaagccaaattacttattatctgacctttcatggaaaaaaatgccagcccctgggctagatcagggaagactttgtaaaccaggttaagagattataacgttttatcacatgtacaggggtgagttactgaatggatttaaacacagaactgatccatatccacttttagaacaatcactctgcagtataaaggttgaaattggggagtgaaagaatgaaggcaggaatttcagttgggaggctgggtcaataatcaggtgaacactgaaggtagcctgggccccacgtaataaggtaaaacgggctccgttttcatgtccacttttgtaatcacactgtctcccaggtccactagatggcaacaccacacaggaaaatcattcatctccaccacaatgtctattttagtgtcctctattattatagaaacttaagagctataattcaagtatttcagtgacttaaccccttgtgtaggtttcaagaagaacctactccatattaagttacatttatatccagactctgtgttgtttaacagagcaaacgggccagggcatcatatgagaaactgaaagatgaacgaacttcaactctccaattaaaatatgctggtgtagccaacagaaaaatggatggaagccccaaatggacccatttactaaagaagaaatatgaagaccaataagcgcaagaaaaactgctcagcctcactaatcatcaaagagatgtccattaaaacaaaaataagatataatttatgcctaacaagactgtttttcaaaatgatgatcccagcattggcaagagcgtgaaaaatgggggcaaaacacagtggctcacacctgtattcctagcactttgggggtcccaggcaggaggatcacttgagaccaagagttcaagaccagcctgggcaatatagcaagaccccatctctacaaaaaatttttaaaaattatgtgggtgtggtggtgtgcacctgtgtttccagctactctggaggctgaggcaggaggattgcttgagcccaggaggttgaagctgcactgagctatggttgttccactaccctccagtatgggcaacatagcaagaccccatctcaaaaaaaaaaaagaaagaaaaatgggcactgccaggcagtgctgctgaaaacataaattgatatgatatttaacaatttttagtaaatatgcagaatattttaattgcaaatattcattgactcaataaatccacttctacaaatatcctaacactataatcaagatgataaattcaaggtttccatcaaggatgtctaccatagcattatttataaaactagaaatagtctaaatggccaatgtcagagaaaccattcatcaaggtatgtcctcacttcattaaatcaataaataatcattgagcttctgccatgtattatgcactacctcatgcactacgctgagtactcaaatactgtactgaacacaatggaccaggtccctactgtcacagaatggaatattaaaaaatggtattttcagagactatttcataagttgggaaaatgtccatagtattataagtggaaggaaaatttttaaaaatgtacatgcaacatgcaaatttaaatgtacattataaatatagtattaaaaattttagttcacagtttcatgtatgtaagaaagagcacacttctttattttctataaatcaacttaattttacctctaagccccagtcctgtaaggttaagaaattcagccttgatcagcctcagaccttcctcctcccatgctctggaattttgtcaaggttctgagtctcatccaagacccaagtatctttgctcatgtgtgtacagtgattatcccaagacatccattgccccacccctgtggtcctgtcagatccactgctctggtctttctgtgagagccaggaaaggtcacaagcctgggaaaactttaggtcaggatccccagggcccagccttggaccattccctagggccttggtacatgtggttcatggtccagctgcatgggcagcacctggacctccccctggggacttgctgcctgtggcccggaccagctgcacctgcatcacttgggcacgactggatcacaatctgcatgtcaaccagagccctagggattcatgtgcatatttcagttttaaaagcaccgccttaactggtcttgccatacctgccaggtggaatgcaggttagggccattctgggacccccagggctgggcattcactcactcactagtctgcagaagttctcccttacttccatcaatgaccattcatatggacacaaaggcagcccaagaagggtcctgtaggcgaccctagcctgctgccctgccctgccactagccaccctcactcagttaaggaggagcaggggcttctacctgcttttaggaggaaacagcaggagaaaaattcaaggaagaagcataaattctagccataagtatatgttgtttttcatgaaatcaagactaaaaagaaaatatcacaatttaacttatgtagcaacattataacttatttttaatcctaaacttctctgaattcagctttctacaatgaatataattccatttacaaacagaaaaaaaaataagtatttgttaatagagtatactcatgctggcaagatacaaagatgcaaaatcaatccagaaataagaagaaaaataggaggaacactgggagtagaacttaagtctcccatccaactcctcaccaggcccgaccctgcttaattcatgagatcagacaagatcaggatggttttagggtggtatggccacagaccagagtagaaataaaagtaacaactttttagatagccagcacaggtcaactgcattcgctgagaagctgaccagattgcttaaagagctgtctagtgtcttctcagggctctggagtttattcatttaaatctatttccaggtagggttgttgagataagccatataagctagaattcctcttctccagggcaggtcatagaaaccagagccccttttctccaaagccagccataaaaccgaaaatgttatgccaaacttccttttctgtgtaaccgccatggagaaattaagaccctcatttcagaagggttctaccctgtactctggcggaaggaatgctgcacagatgccaagaagaatctgcacagacaggccttgctggattttcccatgcagtctactggcattagatcaggcccttcttgtccaatcacatttctacactctgtccctgcttcatcaaacctaagcagaaaaatgaataattcaacttaggtatattagtcagggttctctagagggacagaactaatggaataagtatatatctataagggggagtttcttaagtattaactcacaccatcacaagatcccacagtaacccctctccaggctgaggatcaaggagagccagtccaagtcccaaaactgaagaacttggagtccgatgttcaagggcaggaagcatccagcaccggagaaagatgtaggctgggaggctaggccagtctctcttttcacatttttctgcctgcttgtattctagccatgctggcagctgattagattatgcccacccagattagggatgggtctgcctttcctagtccattaactcaaatgttcatctactttggcaacacccttacagacatacccaggatcaatactttggatccttcaatccaatcaaattgccactcagtattaacaatcacactaggtctatgggtcttttttctgtgtcacgtaaagctacaatcacataaatttgttatgggagtgttggccgtgggccttttgatggagagaaaaggaatcacctcctttccaccccatagcatgtttgggcttttttaaaaaaaaagaagggggttacatggtaattgataagggaaggaatctgccaactacaaatgtctttccttttaaaaataatacacaaattacaggctccagtaaaattcaggctgtcatttcaagaggtccctagcatgaattactgagttaattggctacttagaacaaaaatctacaaccaattacaagcccacgttgctgggttcctgggttttaaccacacactctaatggctggcatctcactggggtcaagctgaggtaccagcaggatgtcaaatggattttcctatgtcctgctgcttgttccagaggccaagtgcccaataggcttggcctcaattttctgagacccatgaagatgacagcatccctgtggtaaaacccttttctgagaagagttgaagcgaggagatccagttaaaaaaataagcaagtaaatgtgcacaaatgttattttaggaaaaaattggtgaggacaaaaccaagtcatggtgccttttggcgaacccgtccttcccggtgcaagtcatcgctgcatacatcaactgcaggcatctgagggaccctcaataagccactttctcaagaacaatggcactttttaagtatatagtttgttcaaacagctatatttaagcgtaggcactttgggatctcagcttgcagcctaaggcaatgaatatgaaaacaaaaatctcagaacccaggttaacctaaaatgccatgaattgttaaaggatcatttgtctcaacaagcaaaatcatgacttttacacaaatataaaaggaatgtgtgatcaaagatttacttaactcattagttaatgagggaactaataagatgggatcactgtttcaaggagaattgaaagaacatgcacagacctcaccaatagacataaaaatagtctctatccccagggcgataattaattgtgcttcactggacaaaattcatttgcatgtctctcaactttctacaacttacagagttaagtaactcaaattaactattagtaaaaaaaaaaaaaaaaaaaaaaaaaacagctcaaaggcaataaaaggcacaagtaacccagaggagtggagtgttctagacaggacttgtttttttggtccatttcagagtcttttgcgatttctcctgacaccgtttattgaaagagctcagcagagtataggcagcaaagcaaatgtattctcttttacaacttctttaattccttctgttgaatacattctccccgtccctaaatgaaacttaaaacaggctccaaaattctttctgtcctacttggataataaaagacccagtcagtcctaattttaaataataattgaagccaatggaaatgtctcttccttctgggctgggcctgtctgctgcttggcagtcacatgactttgtccagttcctccctcgacttgtcctggctcctccctcacttgaagaagggtggagacatctcacaggattattacacttttattttggccttggtacctgctgggggaggcagattccagatgccgagtcatctcctcatagagtgggtccttcagggactccctcttccccaacccaactccctccctggagagctctccctgcactgccctggacgtgagtggtgccttcctcctactctggttgaccacacagctctcctcctgggcttcagtgaacccgagtggtcctcccctttagagaattgttagaggcattcaaagcagggcaactcatcttgaataggggctgggtaaaacaaggctgacacttgctggtctgcattcccaggaggttaggcattctaagccacaggaggagataagaggttggcaggattagtatcacaaaatataggtcacaaagaccctggtgataaaacagaatgcagtaaagaagccagccaaaacctgccaaaactaacatggtgataaaagtgacctctagtcatcctcactgctcattatatgttcattataatgcattagcatgctaaaagacactcccacccacaccatgacagtttacaaatgccatggcaatgtccagaaattgctctatatggtctaaaagggggagggatcctcagttctgggaaatctccacctctttcccagaaaactcatgaatagtccaccccttgtttagcatataatcaagaaataaccagaagcatactcagtcaagcagcccatgctgctgctttgtctatggagtagccgttcttttattcctttactgtcttaataaacttgctctcaccttatagactcgccccaaattctttcttgtgcaagatccaagaacccttgggcactggatggggaccccacttctggtaacagaatcacttccccactcccctccccaagtggtcctcttgtccaaagtccatcccaagtccccctggtctagcccactttcatggaatatactagtgtttctaatccaggatcattctgcctccaggggatgtttgtcacatctggagatattttgagttgtcacaacaggtgggggtgatcctggcatctagtgggtggaggccagggatgctgttaaataacacagccccccgccccgccaccaccactcaccacacacacagaattttccagcttacaagccccccgccccgccaccgccactcaccacacacacagaattttccagcttacaagccccccgccccgccaccgccactcaccacacacacagaattctccagcttacaaacacccatagtgccaagattgagacaccccgagatgtgcagacgaccaacaggaaacccacactgcttcacgccatcaacctcattgcagccaggttccacccaaccctccaccttctgcctagccagccacagctgtggactcttgcactttcaaacaaggatccaggcatcagtcccaaatccttcaaactcctggaaactttcgtcaatctctgaaatgcctccatcgccttgagatgtggtggagacacaacaaccatcctctccaaaggcacctgcactgcctgtctcttcacctcccaaggattcttagcatctctgttacagcttggaggccgatgaggaagctggagcagaacccattcaccatcactaaggtgatctcacaaactggcccggtctttggagcacctgtcagaacttgatacaaataagccacatttaatattattgcaaaactgttgttattggcacattaatagaacaatcaaattctggaaaatattttaaagaggtttattgtgagctaatatgagtgacatggaatgggaaacagtctcaagaggtcctgaggaagtgtgtgcaaggcagttgggttacagtttggttttacacattttagggagacagaaattatagataaaatcataaatcaatacatgttatattcagcctaaacaagtggaataaggagtgggggaaggggtggcttgaaggtcataggtagatttaaagattttctgattagcaattggttgaaagagttaagctttgcctaaagacttgaagtcggtaaaaaaaaaaaatgattgagttaagttaaggaggtcgtggaggccaaggttcttattatgtagatgaagtctcagacttagcagcttgtggagagaagagatggtaaatgtctcttttcagaacttaaaggtgtgaagctttcagttaaactctcctagatccagggaaagacctagaaagggaaagcttggttgcattagtggagattctatacagatgtaaatttcctccacaaaagacagctttgcaaagtcatttcaatctattggccctgtgagagccatttcaaaatatgacgatacaatatattttggagtgaaatgtttttatttctttcaggtcctgctatctgtcatatgatgctatcccagaaaggaatttggtatcttattgccaaagagtctgcattgtcagtctgatcatctctgaatgttggtcagtggtacctaaaccccaaaagagagggggaataatgggatgtctgacctcccttcctatcacgaccaggaattccctttttcaggtttccctggagtccccttggccaggaggagcatctgttcaattggatggggagctcacaattttatttttggtgaattgtgtcccctcaaaattcctatgctgaagccccgactcccaggacctcagaatgtgaatgtattgggagattaggcctttaaagaggtgattaagtaaaaatgaggtcgttaaggggggccctcatccaacctgactcaagtcctcacaagaagaagaaatgtgaacacacagagagacaccaaggatatgcaggcacatacaaaagaccaggggaggacatggccagaaggtggccatctacaagccaaggagagaggcctcagaagaaactgaggagagcaaatatccagcagaccagccagaggcaaaactccctgtctgaggaattcagaagtaattagacttccctattagcaaaagccagcatctggtactgtacccagtgaagggtgtccaggttcttggtgtcttgaacaaagaactggacaaaacacacaaacaaagcatggaaagaatgaagcaacaaaagcagagatgtattgaaacgaaagtacacccaccccacagagtgaaaatgggcctgagcatagccccgttacagaattttttggggtttaaataccctctagaggtttccactggttactgggtatatgctctatgtaaatgaagaggatgaagtaaggttacaaaatcatttactcagtgtacaccctatgtaaatggcgaggatatttcctgtcatagctgaagtgtttccatttgatttagttctaggaggtccttagattctctgcctccagaccctattctcctgcctcagtaccaggcttctttcccaaaactttataagtaactagaatttctatacatctccagaatgcaggcatgtcaaaacccattgcgcaacccttactgaggtcaaggcaccaaaatgtctgaaaatgtaaccatttatcataacctacgtgctgaatatggtccaaattacctttaggctcctgctttaaggtccataaacagccctaaggaaaatccaccgcagggcgctcagtcctctcttgctgaagtgccccactccactctgctgaagggttctttctattctttctatcacataaaactttccttttcaaacctgtactgttgttggtaaattcttcctgccacctgcaagccaaccactttccattgccagggccctgacatcctacccagcagaaaccactcatgacaacgcttggatcttggacttccagcctccaaaactatgagaaaatcaatttctgttgtttaagccacccagactgtggtgttttgttataacagccctagcagagtaatgcaggcctatattggctaaacttccaatccttttggaaaagagtcatagtacaaatgcttaaataaaatataaataaacatataaataaaatactgaagaggtggcctgctcctccacacctgcgggtatttctcatcaggtgggaagagagactgagaaaagaaataagacacagagacaaagtatagggaaagaacagtgggcccaggagaccagcgctcagcatatggaagacccaccccagccccggtctctgagttccctcagtatttattgattactatgttcactatctcagcaaggggaatgcggcaggagaacagggtgatagtggggagatggtcagcaaaaaaaacatgtgagcaaaggaatctgtgtcacaaataagttcaagggaagggactgtgcctggatgtgcatgtaggccagatttatgcttccctccacccaaacatctcagtgtagtaaagagtaacagagcagaattatcaccagcatatctcgcctccagacacagggtggttttcttctatctcagtatagaacgaatgtacaatcaggttttataccgagacattccgttcccaggggcatgcaggagacagaggccttcctcttatctcaaccgcaagaggccttcctcttttactaatcctcctcagcagagacactttacgggtgttgggctgagggatggtcaggtctttcccttcccatgaggccatatctcagcctctctcaatggggagaaaccttggacaatacccaggttttcgtgggcagaggtccctgcggctttccgcagtgcattgtgcccccggttaatggagaatggagaatggcgatgacttttaccaagcatactgcctgtaaacatattgttaacaaggcacatcctgcacagccctagatccttaaaccttgattccatacaacacatgtttctgtgagctcaaggttggggctaaagttacaaattaacggcatctcagggcaaaacaattgttcagggtacagatcaaaatggagtttcttatgtcttccttttctacatagacacagtaacagtctgaactctctttcttttccctacaaaacattgtttcttttctttctttttttttttttttttttttttgagacagagtctcactctgtcacccaggctggagtgcagtggcatgatctcagctcactgcgacctccacctcccaggttcaagcgagtctcctgcctcagcctcctgagtagctgggactacaggcacgtgccaccacacccagctaattttttgtattttcagtagagacagagtttcaccatgttagccaggatggtctcgatttcctgaccttgtgatctgcctacctcggcctcccaaagtgctgggattacaggcatgagccaccacgcccagccaaataaaatactatttctaatacagtccatacaaggagagacatgatcttttttagtattagataataataacaatagcaaacaccaatcaaatgcttactacgtgcaagcaccatgataaattctaatacacattgtttaatcaaacttaataacagctcagtaaataaccactgttataacctccattttaaagattacaaaactaaaccctcaaaaggttaagttaaactagcccaatgccacagagttaataaatggcagcaatgagagctgaaccaaaggaatctgtgtccagtctcactcataatgatcacataattctgaaggaaaatgtctggacaaatacattttgagtaaaaccaaccaaccaaccaagaaacaaaaaaacaagtttcactcatcccaacccccaggtgacataagcaatacactgctccttctgtgacgcctctccaggttaatcattcttgcacttggagcaggtatgcatttcagtctgcaaacacagactattaaagatacataattttgtgcatcactcaaaggttctgtttctaggcttcattccatccagtgttagaaactaaatttctatcagttggtagccgcctccttcctcaaggtgacttctatattctggaggcttctgtgacatcaaacatccaggcagggaatgcctggacctagtgtcacggtccaacttcaccacgtgcggcagtccaccatgctgcctcctccccaactcctaacactagcttgggctcctgggaaatactcctgctccctgtcctctccaggctgtggaagatctgctgctgaacccctctggtcccacaaaatcatcctgatgcctcttaaccctgcggaggcctcaggaaacactgtgagggtgtccaaggcacaaaagcctagatgagccggaccggcatgcttttactcctatgcattgtaggaccatatccccaggctttgccaagggatagggaacaagcgtatctctggtctcagacacaccaaggtcatctttgatatttaccatgtctctactccctcactgggatcagtgtagctgagggataaggacacaggagttgagcatatttaattgcatacaggtttagctgctggacccagagatccaaaatagcagtggcatatgaaagagagaggtttcttttttcccatgtgaaaatgcagggagaagcctggcacagtggctcacgcctgtaatcccagcactttgggagcctgaggcagaaggatcacttgaggccacgagtttgagaccagcctgggcaacatagcaagaccagatctctaccaaaaaatatatacatataattgcaattagctaagtgtggtggcacacacctgtagtcttagctactctggctgaggtggaaggatctcttgaacccaggagtttgaagctacagtgagctatgatcacacctctgcactccaggctgggtgacagagcaagagcctacctttttaaaaaaaaaaaaaaaaaaaaaaaaaaaaaggtggtggggaaggtaggcagctcagagctggtatggtagctccacaactgtcggaacaatgctaggatggtttctcatttgtcattctgccagcatcaacacacagcttctaacttattatccaagactgtttcaagagcccccgccatcccattctccttcccatcaccaggaagaaggaaaaggggaaaagggagggtattcctctcaagagtccagtgtgcagactggctcctcacttcctcctcattccatccgtagaatgagttgaaatgtactctttactgtattcccttctatctgagcatcatttaaaactttgaagcaacttcttacattctgttttttctccagtctccctaaagccgccaagttggctagaaaacatcttaagctggaaaaccgtgggtccaactacaaagtgcactgttccatgacagggcagtctggatattgggactacctgcggcagtcacatcacctcagctcaagtattgagagaggtagaaaacaggaactggttaagatttcaaaacatcctgccatgctcatcatcccaagttgtgattctttgcttacaagctcttctctcccatttatctcagtgttcttaaggccactgacccagaatttacttttctgttcgtgacccctctggcctgagcctcgcagagtccctggcttatggcagatgctcaataaatgtttatttgcagcatcctacatcatgcactgacttagcacatttttgagtgcctactattcattaagctaaaaatctccccattctctgtcatctcaaaggcacttttcttgggcaacactctcaagcctctgtgaagtccactttatgaatttagaagagtttccatggaagaaaacatattctcaagtacagaaatcaagatgaaagctgtggctgcattctcttggtctaggcatcagttaggatgacatttttctgaagactgaggactaagctctgatttttttttatcttgcccaaattcctatctaggaactcgagggagttattccctacaaaccataaattctcatcagatgggttttatttaaccccatatatcatggcttactttccaatctgaccctggcataacattatgagataaggaagaaaatcaaaatgttttatcccaaaatatatttccctgccatacctcgaaattgccctgcaaagtctcttgtgggaaaaattcacagtctatagagaatcccctttcccctttgttttccttcctttccagatccaggagataatcaactaagagccaggtacccttttaggtctgataagaaacattttacaacctgctctctctctctctgaaggctgactatctgagtttcctctgcataataaaacttggtctccacaatcctttatcttaacctaaacatttccttttatcccaggtcttcagataaattcaaccaattgttagccagaaaatgtttaaatttacctacagcctggaagcccccgctttgagttgtcccgcctttctgaatgaaaccaatgtacttcttaagtgtatttgattgatgtctcatgtctccctgaaatatataaaaccaagctgtaacccaaccaccttaggcactggttcccaggatctcctgagggctgtgtcatgggccatggtcattcatatttggctcagaataaatctcttcaaatattttacagagtttgactcttctcattgacaagacaatggtggctttaaaaagaaatagaattttcagccaggcacggtggctcacgcctgtaatcccagcacattgggaggctgaggtgggtggatcatgagctcaggagttcaagaccatcctgccaacgtggtgaaacccccaaacaattagctgggcatggcagtgcatggctgtagtcccagctactcgggaggctgaggcaggggaaccgcttcaacctgggaggcggaggtggcagtgagctgagattgcaccactgcattccagcctggtgacagagcaagactccgtcaaaaaacaaaaaaacaaaaaacagaaaataaaagaaaaaatatatagtttcttgttttcaagtaaaagttcaaatatagccagaccagggttgagaaggtggttctgggcagtaagttctcatacacccaagttgtttccaggttgttaccccttgagtgtagccctagtcctcgtggtccaaaataatgattagagctccagccatcacaggtatcttcaggtagcaggatggaagaaaggacagagtgcaggggtaaggccattcatcagctctgttttaggaactgttgctggaagctgccacacaaaatttccactcctatcttaagtgtccagaatctagccacacaaacatatctagctgcaagggagactgagaaatggagtattaactctgagtagccatatgtaattttgctattactgtcaaaggcgtttgaactagagtgactccatcttgaattggggctgagtaaaataaggctgagctctactgggctacattcccaagaggttagacattcttagtcatcgaatgagataggagctcagcataagatacaggtcacaaagaccttgcagataaaagaggatgcagtaaagaagcctgccaaaacccaccaaaaccaagatggcaatgaaagtgacctctggttgtcctcactgctcatcacacgttagttataatgaattagcatgctaagagacattcccgctagcaccatgacagtttacaaatgccatggcaatgtcaggaacttaccctacatggtctaaaaaggagagaaaccctcagtgccaagaatttcccacccctttcctggaaaactcatgaataatccaccccttgtttagcatataatcaagaaatatctataagtatactcagtcaagcagcccatgctgctgctctgcctatggagtagctattcttttattctttcattttcttaatgagcttgctttcattttaatctgtgaactcaccttgaattcttccttgcacaaggttcaagaaccctcccttggggtctgtattgggacctttttccggtaacattactacagaataaaagagagtagatgttgggaaaggcagactagcagcctctgccacagtgagttgatttgttctagattaatgttgagaaagtatttgaggaattgaaacatgctcattactttattcccttcattctaagcatcatttaaaatttaaaggcaacttcttgcattctgtttcttttgcagtccctgcatgtaaaggggttgtcagcgatggtgtcactcagtggcatatcttcttgatgttccccacagccagaggattctctgggcttggaggcacctcccctgctgctcttcaacaatttagcaatcagtggagactgggaaataaaggagcaagagaagcactggataagagggaatagcaaatgcgaaaaggaaaaccacaggggggtgatggttcattggaaagtataaattattcatctcatgagcttcttctcaaaggataaagtttcaatctgcttgggttttaattacagcaaatcccatgcctaaaggggtatttgatccgaggcaaaattgagccagtaaattaccaccagggcatatggaaaatttgtaagtcaaagaagaaacacaggagccttggggacctatagataccagctacctgtttttatagtttgagaaaatgttagttataaccaggaatttatgggtctgattaactcacccaacaccagattatttgattatttaataaaccctaagggaccaaaaataactctgcgtctagaacaggacttttcaacctcagccctattgccatttgggactggataattctttcttgaggggatcagtgcattgtagcatgcagcatcactggcttctacccaatagatgtcagtagcagcccccaggaatgacaaccaaaatgtctccagacattgccacatgtcccctggggcaaaacagactccacttaagaacattggccttgatcctgtagaccaaaaactatctgagacagttctccatcaacctggagagtttatattgccaaggttaaatatgctcttgttaaacagccacaggaggtccagaggacatgtgcccaaggtggtcagggcacagcttggttttatacattttagggagacatgagatatcaatcaatatatgtaagatgtacattggttcagtcaggagaagtgggacaactctaagcagagagggtgcttccaagtcataggtagataagagacaaagagttgcattcttctgggtttcattttttttttttttccttcccaagacagagtctagctctgtcacacaggctggagtgcagtggcatgatctcagctcactgcaaccaccacctcctgggttcaagcaattctgcctcctcagcctcctgagtagctgggactacaggtgtgtgccaccacacccagctaatttttgtatttttagtagagatggggtttcaccaggttgcccaggctggtctcgaacttctgacctcagatgattcacctgcctcagcctcccaaagtgctgagattacaggtgtaagccactgtgcctagcctcttttgagcttctgattagcctttcactgaatacacaatttataagaatcattacttatgccttagtctggcttagtgagacaatagggcaaaggaagcaatcagatatgcatttgtctcaccagagcagagggatgactttgagttctgtctgtcctttttccataaggaatttcctggtgggcaaattgtgagggaggtatgtagcttttttatctttgtagctaccatatttaggatagaatgggaggcagatttgcccccacagttcccagcttgtcttttccctttggcttagtgattttgtggtcctgaaatttattttcctctcacaatcttcttataatttttaaacagagactcaaagctgacaactatgtgcttgggttttattcagagaccactgtattattttaattcaattttcacttccttgttcattcattaattcatttggtgaccttggaattgcaggagtggtgttggagataaagctcagagtcataaagaaactgagcatgcaaacaaagagttcctcagcaaggcaagtttgctttctgcagaaagggtgctgttcgcagatctgatcaccacgagagcacacagaacaaaggaaagcagggggttttattcctaatgcaatgggtttctactactgtgtcctgtctccattggttggagctggaccacacaatctaaactggtcccagctggctaatttgaagtgtgcagggagggggttacactggcaggaagggcagttttggcgggaagagccattatggctggaggggtaatctgcagagtgagtgactaagggaaacgagcaagaaacagatgtggactatagattaggaccggtaggaaggttgtttactgcaaccaggggcaaggagacatgaagaacaaggaagttaacatgccaaacttttgaagaggagctgactgtatctgacaagtgaccaaggcagggaaggtccctgccctcaccaagcttacctggcactaagcatgcactgggcctctataggccctgtataaggattgtcatgtttcattcccacaactgcctccaaaagcctgtattaatgttactcttgtttcacagacaatgtaactgaggcttagcaaggccaagtcacttgcccaaggacacacagctaggaaatgtctgggatcaggaaatttaactcttatgacttgatcccagaatctacacttttgtcagaggcattggaagcagagcaactgcatctcaaattggggctgggtaaaataaggctgagctctactaggctgcattcccagggggttaggcattcttagtcacaggatgagacatgaggttggtgcaaaatacaggtcacaaaccccccgtgataaaataggacatactaaagaaacctgccaaaacctgccaaaactaagatggcaatgaaaataaccactggtcatcctcactgcttatcatacgttaattataaggcattagcttctgaaagacactcccaccagcaccatgagagtttacaaatgccctggcaatgtctgaaagttaccctatgtgatgtaaacgggagatgaaccctcagttccaggaaatctcctctcctttcccagaaaactcatgaataatccaccccttgtttagcatataatcaagaaatcaccataaaaaatagtcaaccagcagcccttggggctgctctgcctatggagtagccattcttttgtttctttactttctttctttctttttttttttttgttttttgttttttgagacaaagtctcactcggttgcccaggctggagtgcaatggtgcaatctcggctcactgcaacctcctccgcctcttgggtctgtaggatataataaattcctcttcaaaggttttagcttctaaattgttaagtacaatgagttctgagatcctttccaaagaaccaatgtatccgtatgttcagctccccgttctttgttcttcattttaaagttcaacttcctcattctctttgtctccttgcccctagtttcagtaaacaatcccctcctagcttctatcatctgctccttcctgagtcacctgctccatcctgagtcactcctggtcacctgctctgacctgagtcatctgttctgtaaccatccttcccaccaaactacttaccccgccactctggactcatacctctgctctctttaaaacagccaatcggaattagcttagactgtgtggtccaaccctagccaataggggaatgacacagcagtaggggctacctgcatcaggaatagaaactccttcccctcccttgtcaaggtgtgctttcgccattgctccatccacgagttgcacccttctatagaagtaaaattgcctcgctgagaaaatttaatttatgttcgagtgctatttcttttgcagcaccaaaaatttatttctaacaggttcaagggattctccggcctcagcctgcagagtagctgggattatgggtgcctgccaccacatctggctaatttttgtatttttagtagagacagagtttcaccatgttggccaggctggtttcaaactcctcatctcaggggatccacccaccttggcctcccaaagtgctgggattacaggcgtgagccactatgcccagcctctttactttcttagtaaacttgtttcactttactctatggactcaccccaaattcttgcaagagatccaagaaccctctcttgagatctgcatcaagtccgctttctggtaacattttcagccattaatttagtatcaacgatatgccaagcattgtatttgggacttaacataattatcacacaacaacctaagaaggataggttattgatcccatttcatagataaagaatctgaggctctaaggtgaagccttagagtagggagtaggattgccatggcaggcctagatcaatcttaatttatctcctggggtttgccacagtgccaccaacacaaagtctaggttctgctgccaggaacaagaaagcatagttgtttgcaggcaaccaacaaggaatgtccgattgaccacatctgttacttcacatccagtatctcacaggatgcctgacatacttggtaaatgtttattgattgaatcagattctgtattcatcagctcaggctgttctaacaaaataccatagcctgggaggcttagacaacagaaatttattttctcttgggtttggaggctggaaggcagagatcaaggatcaaatatggttgggttctggtgagcactctcttcctggcttgcaaatggccaccatctcactgtgtcctcatatgttacagagagagagagggagagagagagagagtgagagagagagagagagagagagaaagtgatctccttcctcttcttttaaggtcacagtcctatggcattaggactcttatgaccactcttatgacctcatttaatcttacttacctcctaaagactctatctctagatgcagtcacacatttaggactttaacatatgaattggggtgggagtatggatacaactcagttcatagcagagacaaaataaataaataaatgaccagtgatgagtgcatgcacagccaaagaatgagcacatgcacaactgaaggaatgaggggacaagtgaccaaataaattaacagaggcaggggttcagttagatgatattgaagtatatacagaaagtcaactttgtacttgtacataaagtctgtactttgtacagaaagtcaatttggactctactatagtgctacaataaatgatttgaaagactactacgttttgacttctggaaaacctcccggaaatgtactttcaccctacaggcatgtgattaaatgaatagcatttggtgtttcatcacactcagcattggctacaatctctctattctctttccactttcaggtaataacccataaactcatcttctatgaaacaggaaaattgtgttcctaattaagtcatcttagttatgagatatattggatgcttacttcaatggataataaatggaatgatgcttttaaactcaagtctgattcacaggaaggtcaagaaacttcaaaaacaaaagcattctaaccgattccaacatcctaacccattctattatccatgccaacctactgagttctaacccattgactacaactcaacttctggcacctgacccagaaaaacatgccactgatggctcaaggaaaaaagccaacaagtgcagacgagtttagaagcaccagaggaacaaagggtttagagcagaggttctgcagatgccaacacacagcaacctctcacggacaggacggcaagcaagccctgcactcagtcatcacacattgttctctatcgcatgttcatgctgaatgcatcaacccggctattaagtcaagacatcattatagcccccacgtgaaggactcacactggacaaatcttaattctcagaaaagtaaggacacctttcaggcaaaatctagactattaatcgtcagtcaagggcccactcttttttctttgaaagcaatgttttccataaaagccttgactttaaaaaaaaaaaaaaagccatttctaacagagaaaaccttcatgttaccatggttcagatcatacataaagagttattttcttgctctgtttcaaagagaaaggttccagtggcaaaatagcccacctgtccttggagcacttaattttcttctatcccattccgctttatataacgttgttatctatttttgtcaaccaatgttcctttaaattatgaattcagcaaaatgagaaaacttcatggtcaactttgtgacaatctgaaggacacaaagaattgtaagttttataacttagtcaataagagtagcggatactgtggtgtgttgcctggattccactcactaggacagaggggctctttccccagcttctagaagtgctggtgcctgacagaaattagctgagtccttctctgagtgaggcttgtttgccttcagcagatgaaagatgtcttaactaaggatatgcaagggggaaggggaattccaacttattatctcacagttctgtagatcagaagttcaatataaatctccttaggtgaaaatcaaggtgttggcaggccagatcctttattgaagggtctgggaaatattaataataagatcccaggctcactgttactgttgacataattcaggtccatgtggttgtagagctgagctctccactttttttgctggttgttggctggggggtgcccccagcaattggagaccaacactccttgactcacgatccctttcatcttcaaacctgcaactgcaggttaagtctttgtcccatctcatcagtcctgccttctctttaacgtcactgtttcactgcaacagggaaacgttgtccacttttaaggactcatgtaatcagattaggctggcccagataatccacggtaatctccccgtatcaaggtccacaatcttaatcacatctgctgggaacagaccccaagactggccataaacaagatctctgaaacactgcgacatgattgtgatggctatggcgctcatgctggagattgctggtttaccggaatgagggcaaggaacacctggcccacccagggtggaaaaccgctcaaggcgttcctaaacaacaatggcatgagcgatctgtgccttaaggacatgtctctactgcagataacaagccagaatctgtccctttgttctccgtaaagaatacttttagttaatctataaactgcagaaacaatgtttatcacgggcttactgtcaataaacaggtgggtcaaactctgttcgaggctctcagctctgaaggccattagccccctgatcccactttgcactctatttctttgtccgtgtctttattcctctagtgccgctgggttggggtctccacaaccaagctggtctcagcacacatctgcaaaatatattttgctatgttaggccacttagtcacagattactggaacagggacatggatatcttggaggaaggaggggtaggatgtttttgctaccacatgcataaaaaagtatatttagtgtgtccatgttcatctagctctaccagaaaaacaaagattcagctatttatttagctatcattctgtgtatttcatgcctacactgttgtaactgctgtattgggtgctatgtgtatcagtgaacaaattagatggggcccctgactttgtggagttttcagtttagtagagcagctcccaaggtgtggtcctcagacagcatcatcagcaccacctgggaacttcatagaatagcactgaccccgttccagacctactaagtaagaaactgagggggaggtggtgggattgtattttaataagccttccaggtgatttttacacatgctaaagtttgagaatcactgatctagtaaatctttatcccatgaggtgtgcaaacattttctataaagatcagatggtaaatatttcagtctttgcagtccacacatatcactgctactcaactctactgttatagcacaaaggcagtcgtgacagcacataaacagatgggtgtgtctgtgtcccaataaattttgcagatgtgtttatcaaaacagacggtaggctttagtttggcaatccctgctctactaagggaaatgagctctccaggcgtaagagtggaggtttgttctatggatagaaatattttcttagggcttcacaaaattaggtgtccccctttcaattacccaattgcctcttttctgattcctaactcatcaagcaacctctggataataatcaatatttttaggaatactagaaagatgagctcctctctacaaaatgctctcgtactctgatctctacagttttatcattataaattaatgcatcaatctttagttaaaatgaactgagtatctacggatgtgctaagaatacccaccgaagggtgtaaaatactgcttaatagacatgcgatagacagaattatgccccccccatagatatgcacatcctcatccccagaacctatgaatatgttaccttacatggcaacagggactttgctggtgtgattaggttataggccttgacatgtggagaatattctggattattccggaggacccaaggtaatttctccttataggaagaaagcaggagagacaaagctggaaaaggagatgtgatgacagaaacagacattagaatcagagagagatttgaagttgctacattgttgcctttgaaactgaaggaaagggctataaaccaggaaatccaggtgacctctagaagttgaaaaatgcaaggaaacagagtctctcgtacagcccccagaaaaaatgcattcctgggcaaccattttgtacaattccctccaggactgtgagagaacaaattgatgttgctttaagctgctaaacttgtggtcatttattacagcagcaataggaaactaatccagcctgtcatgcagggatgacaaaagcacaacaggaatgcttctatcccctccacctgtatccctgtgggcattgctgagcaacctagcactctttttctgggtggatgaagccttgggattctttgacacctagttctcctggtaacaaatatctattgacccaaattagaatacaagaatggtccatattcttagttgtaaacggcaaaacttattctggctcatttaaacaaaaaagcaatatattaaaggatatcaggtagctcgcggactttctgggaagatcagaatattaggcttggacactgtactacatcaaaaatgcccatcttaccttccttcatggtcccagtgcaaagcctttggcccccacctctggtcacacactgcaaggacagagaacaagcactgaggctatttctgagtgcaagatgttcctccccccgcatcactgggatgcattccacaatgggcttactcctcacatcactgcttcttttttttttttttttttttttttttttttgagacagtcttactctgtcaccaggctggagtgcagtggcacaatctcagctcactgcaacctctgactccctggttcaagggattctcctgcctcagcctcctgagtagctgggattacaggcacaagccaccaagcccagttaatttttgtatttttagtagagacgcagtttcaccatgttggccaggatggtctcaatctcctgacctcatgatccacccgccttggcctcccaaagtgctgggattacagacgtgagccaccgcacccggccactgcttctttttagttattattttttggatttaagttgaacttaggtagaaatgagagccttgtgaggtagtggctgcttctataaaatatcacataatttttttttcttttcactcttctccttaattcttaaagaatctgttttcctggtgaataaagagacttcttttggtgaagggatggatagcaatgtttccttttttaaaaaaaattttagttttgtagagacaggggtctcactatgttgcccaggctgatcttgaactcctgccctctagtgatcctcccacctcaggctcccaaagcacggggattacccacatgagctgccaagcctggcctcatacccctgcttttgaatcagagttttaaaaggctagatttgtttcctctatgttcaaagtgtaggctccggaccagcagcattggcctcaccaagaccttcagaactgactctctgcagtctaacaagctccacaggtggttcagacgcacactgaaggctgagaggtccagctgcacagcatcccagcccctaaccattattcacagtgcaggcccctactccctgctataacaccaccaaggcaatgccctcagaaacacaacactcaaaacagatgactcaaaagtgagccaggcaaaggaagaaagtggagttgtcagaggcatttaaaccagagcgactcctcttgaataggagctgggtaaaatggggctgagacctactgggctgcattcccagacagttaaggcagtctaagtcacaggaggagataggaggtcagcacaagatacagctcataaacaccttgctgataaagcaggttgcagtaaagaagccagccaaaacccaccaaaaccaagatggtcacgagagtgacctctggtcgtcctcactgctacactcccaccagcaccatgacagttcacaaatgccatggcaacgtcaggaagttaccctatatggtctaaaaaggggaggcatgaataattcaccccttgtttagcatatcatcaagaagtaaccataaaaatgcacaaccagcagccctcggggctgctctgtctatgaagcagccattctttattcctttactttcctaataaacttgctttcactttactctatggactcgccctgaattctttcttgcacgagatccaagaaccctctctgggggtctggatcaagactcccttcctgtaacagagttgagggagatcaagggcacccagttttgtgactgataagagaaatacaactatagagggctaaaatggaatttttttaaccaggaaatatgtacaaatggcttagacaccatagaggtttttctcttcattatttctggttcttcatccagacttggtggcatcgagaagaactaggagcaaatgcatcattttatcttcagacacagaaaactcctgccttatgtcattacttggctcggttgctacaatttgtgaagcaaccataagaaaatggacttggagaagcaaattggtttttactctgagtttccaaagaggttccaacagagtgcaaaaaaataaatgtttgaaaaaaaatacacacaaatagtaccttgacctgttccttccactgaaacattcagaaaacaaaattgcccattctctatccctgagagctctttgaaatgcaaggggaaaagaaatttgtagctttgtggttggaaatgctcttacattctgctgaattttaaaaaggaatatttccagtttgaattttttttaatttggaaaaggagaaagtgaggaaataaaggcttttgtgatgcaaaagttaaacccagcctagatgagcatgtttctcgctgctatttcagcaccaggaaaatgactcttccctgaatttgtatcgcacgcttttaccaataacagaagatttatttattattactgaaaagaaatgaaaaataaaactaagcaatctccttggtgaaatgatcgggtactagccctgcaatgacgcaagtcacctccccaacacaagatctaaaaaaggatgaaattgcaagaggtaagcaggtgtgactcttgcagtggtctagagctgctcatctccttccacctggagagatttgggggttaaaaaggggcagtcaatggggaggggggaagcacagatatcctggccttaagctatcaactcacaccaaataccgcagagagggacatgtgaagcttctgaattaaagaaagtcttttcaaaccagacacaaaatatcacctattatataatcctatttatatgaaatgtccagaagaggcaaatccataaagacagaaagtagatcagtggttgtcagggactgagggaagtacagggtggagaaggactactaatgggtacaggatttcttcttggaattctaaaaatgtgctggatttagtgattgcacaatcttgtggatatactaaaagccattgaatcatacactctaaaatcatgaattttatggtatatatatttcaattaaaaataaagagaaagtgagatttacagttgtaaaaatattagaaacagtatatgagtaaaaataaatttaaaaatcagttggaaaataaagtttattcaacacacagtattaaaatacttggacactaagttgaaaaaatagagctaattttctgttgcatgccatttggacaaacatatttatgtacttatatgtaaacaaattttaaaatctatagataaagagaggaaggaaggaggagggagggaaggaggaaggaagaaaaaagggagggagggagggagggagggaggaagaaaggaaggaaggaggaaggaagaaaaaaggaaggaaggaagggagggagggagggagggaggaagagcagggaaggaggaagggaggaagacagggaagaaagagggagagaggaagggagggaagaaagaggggaaggaggggaaaaaagagcctctgccaattagcggagctattgatggtaggacccagaggtaaatggttctttaaagagtggtgctaatagttcttatggttacgaaaggcagggctgatttagtcaacaaacatttagtgggccaggctatgtgctcactaaaaacctagaactcgaggaaagaccagatccagcaaagtaatgacaaaccaagacctaaggaaggagaagacaaataagaaatcctccataatgagaaactcccaacagagaaaagtgccaagaaactgatttcctgtttggagctacataatccccctctgctttctctatacctttagtaaagattgttacacacaaatcccagctacttgggaggctgaggagggagaataacttgagcccgggaggtggaggttgcagtgagccaagatcgcaccactgcactccagcctaggtgactgagcgagactcttgtcttaaaaaaacgaaaattgttatgtacagaagcttctgacagtgatgtcttggggactgaagaagaaggaatgagttcacatttgcggacaaaaggagaccagagaggagtggaacagccaggaagagctgtggacaggcagcctcaggtcattaagagttgtgaacaagaagaatgcagagaaaggggacaaacataaacctcgacaattagcaatgtttcaaatgcagtttgttgttgtcaaaccccaagcaaaaagcaatatgttctaaaaacaaagcctgtatatatcatgattctccattcaaaaaaacatagtttactcagcacctcctactatgtgataagcacataattttcagcttagccactatctttccctatgtcttttttttttttttaagatggagtctcgctctgtcacccaggctggactgcagtggtgtgatctcggctcactgcaacctctgcctcccaggttcaagcgactctccttgcctcagcctcccgagtagctgggactgcaggcatgagccaccatgcctggctaattttttgtatttttagtaaagacggggtttcaccatgttagccaggatggtctcgatctcctgacctcgtgatccacctgcctcagccacccaaagtgctgggattacaggcatgagccactgtgcccggcccctatgtctaatagaaataataagggtgatggttgtatatttcttgccacagccataatgattcagaaaagctcatctcattctcttctcccttctttttattatgaaaaaagtgtccattttttctgagtagttgtcgtctacctgtcccctagagttccttgttcctctcatggctaaccatagggctactagaggctgttgtgttaatattacatccataatttctgctactccttttcccattgcacaggtctgcccatgagcaatggaggtagaaagagcacaggttttggcgtgaaacagatgtgggttccaatttctgcttttctatccccactgtatgacctagggacattcacttcatttctctgtttcttgatctgcaagatggtatggtgatatgtacctggatggtggttttggaggtaagcggcaatgtaagcaaagttcctggcacgttaaaatattcaataaagtgactgctgatattatgatgacagggcaggcattttggcacttgtcggcattgaacctggtaggaaaagtgtgggaaggagaacgtgggaaagaacaagagaaagacttctgttggaccccacacaggacctgccctactatcaatgttactgtttggtacttatgtaccatgtcccttccatgagtaagagtagggatgtaagatggagaaaaaaacctatataaaaatatcaagatccctagggccaaacttgtgtaatcaaagctcaattacataaaattaccttaataagtgatcaaggctatcatcccagtgatgttatgtatcatgtaccccccaatatgctgtgattacaaagcacccacatctgtgatattcttttcataaacccatatccccagtctaattgtaacaaaaacatcacacacacacaaagtgagggacaacacacctgatcagtactcctcataactggcaaacgaatgaaaagctaggaagactgaaattgccagagaccaaggaagactaagaagacacaacctagtgcaatgcagcatcttagattggacctggaacaggaagagggcatgaatgggaaaccggtgaaatcaaaataaagcctggagttcattagtagcaacgtgccaatgttggtttcttagttttgacaaaggtgctgagttgatgtatgatgttaacaatggggaaaataggatggggggcatatggaaactctctgtgctacctttgccattttgctgtaaatctaaaaccattccaaaatacaattcataaatattattagaggctgggtgcggtggcttacacctgtaatcccagcactttgggaggctgaggcaagcagatcacttgagcccaagagtttaagaccagcctggacaacatggtgaaactccatgtctactaaaaattagccaggcatggcggcacaagcctgtagtcctagctacttgggatgatgaggtgggaaaatcacttaaacttgggatgttgaggctgcagtgagccttgatgggaccactgcactccagcctgggcaacagagtgagaccctgtctcaaaaaataataataataattaaaaataaaaataaatatataaatatcatcagaaaaaaacaccattacatggcaccatggttggccactataggagtgtcacaaatagatattaggaacttctatatttgttttagattattgtaaaatgtgtcccaacgcctccataacattcatagatgagctgtctttgtgttccttcccagtagctgcccctgctgtcatgtccttggacagtgagtaactccgcctccacttgttctaactattcaccatcataacaggagcctccggccaggcacaaacctacactggtaccttagtcacacaggatgtgccacagtcaactccctcatgtaggcagcccttacatgacactatgagaggtggcaggaccaaaaacaccctgtcatcagctctcccacaatatctagaactcttgtaaaactcagctcccaggtatatacagtgggaataacccctgtggatgctggccagtcacatctcaatgttggcacacatttaactcttcttttgtggtgaacaaggacatgcaccactcaggtccttcttcaaggaagaatttgttgccccatttgtcagcagaaagccttgagttgtaattccttcaagatttgcctcatctgcagagccacgtcttgaccgtgagctcccccttcctgcccagcccacatacagtgactgactgtgtagtaggtataaagacccagacatttcagcccaacagggacaactttgctatgctctggagctgtccaaagttggctgaggcctggtcaggcctgcctcacagttaagcttcttccttggcccagttctgctttctgtccttccttcccataagtattgctctctaatgaccatcctacatacccaccaactccatctcagcatctgtttctggggaactcagcctgtgacatctttcttagagggagagaagactgtgttcaggatgaccaactgtatgatcttttacctaatttcgcagcctcccttgcagctagggtgaatcacgtgacccagttctagccaatgaggcatcatcaaaattttattggaggatagatggatatttgcaggacaaaaaagtttttctttcttcatacacggtatcccattggtacagggatcatctcagtacctttcaccttccattttcttctcatcatagatgtgacatctggagctgctgccatcttgtaaccatcaggtgactcatatgaaagaaatgccatgatagctgaagagacaataaccctgaaatcactgagcctccaaatcaatatggccaccacctaccaccagacattgcaatctgtgagaaacataaactctcatttgttacattacagtcactttctgttacctgcaacagaacacatccctaacagagagtgaagaacagcatttactgagtgcctgctgcataccagcccaggactgaacactctctaatctctctcatttaatgtccacaacagctccttaaaaacacactgcccagccctgcctaggcccactgattcactcctgacaaaggttggatgcagggcagacatactgtatctagtcacccagccctggaatctgaacctgggagttgtggcctccgctctgagccaaggacctgtctcagatatgaggccatgacaaacacatgtgagggcaccagcacacgccctgtacattacagcaggagagggcatttcagcctcatcttctgcctctgcctgtctaccagctcctgtctgatagctattgaaacaccaacagttcttatttagaaagatctcaaaatacagaagtgcattagaagagcgggatattacacaagcactttgaaacacagattattttgcttggctttcacttagaaaacacagctacctaagatatttctaattctggctattactttaggaaggcaatcagttcccaaactacccaggcataatggctttggttttttgtttgtagccaagtaaacatttctcctttccacccacatatctggcttctatgcaccccaatacagaaagagagaaagcagctgcaaaccactgggaaaaaatcaagatccaacgtctctatcagaatattgatttcagttaatagcacataatcaaacatctttacacagaggtttcatttaaagaaagtggagctttcttctgagttctgttataacaactcagcatgcaagaccagaattttaagtaatattttaagcttgtgctgcttttgcacattcatttgtttattcatcaattcaacaaatatttattaagtgccagatacttttctaagaattagggataaaacatcttaggtctcctccctaaatcacttccctcttttgtaatattagcagtctaaagtgctacaaccaaaagactcaaacttttaatgatttaaataaaatagaagtttatttctctttcatgtaggattcctgaaggaagcatcccaagtttaaaggtgagttcagccatctacaacatatggtttctattcctggctcaaaagtggcctcttgttttttccagcctatccttatcccagccagtaagaagttgggtaaaggcaggggaaaatatgcttgtttctttgaatagcccaacagagtagtagtactgtcacttctgttcatatccattagtcagaccttggtcacatggccatctagctgcaagggagcctggaaaatgcaagttctaactggacaaccatgtgcctgactcaaactattatcagtattttgactgttaaaacaagcagtttatgaataacactggatgatggctggtaaatactgtagaaggatttaggccagctatgcacttcctacagagttttaaataaataatttaagaatactcttgtcaactttctctatcactatgcctccttattgtagaataactctgaccttatcatgcacgctctcatctctatgaccaggccaacccctgccccgtgcaggcctgggggcttgtcttgactttgacatttattccagggatggagctttccaaaatgcccctgatatggtttggctgtgtccccacccaaatctcaacttgaattatatctcccagaattcccacatgttgtgggagggacccagagagaggtagttgaataatggaggcaggtctttcccatgctattctcgtgatagtgaataagtctcacaagatctgatgggcttattaggggttcccactttggctgcttcctcattttttctcttgccaccaccatgtaagaagtgccttttgcctcccaccatgattctgaggcctccccagccatacggaactgtaagtccaattaaacctccttttcttcccagtcttgggtgtgtctttatcagcagtgtgaaaacaaactcatacaaccccaatcccacatctggcttctgaatacctactttcaatggttagggaaggcttacaacattagttaaaggcactttggcttgttagccagatgtgaagttatcactttctgtgtgacctttgcaaattacacattctctctgcactcagtgtctccatctgtaaagtggcaatagtattgttacctatcccatgggttgttgtagccactcatcctgattctcagctgtaaagaagttagcagagggcctgtcatacattagttctcaataaatattaattgttacttttaatcctagttcatctatgctcagatgttaagtgttggcctgaacctctttgtatctttacttccaactgcttttgtatcaccaaacaaggccctggcacccttggcaggccatcaggatttacccacctagggagaatgctgctcacctacccacctagggagttctctgtggcctcaaactgcaacctttctgcaaatactgagtccatctgcaaccatgttccccagcttgacccacttcctcctgtcaatggcctaatcttggacctgataagtgtttgtaaaatgagaagaagggtctataaactgagcagaagcacaacaaatctctttattttctccgtgcatgcagtgcctaaatgaaaagcaaggcctattaattcagtctcctcaagataatttcaatcataaaacaagcacacatttttaataagaaaactcttcagagcagctgataatgaaagctccaagaataaaaatgcaatcagaagctgccagcactgcaaataccttacactcctagagccagagtcttgggctggttgctatttcatcatcacaggaggagacagtatagaaagggcttcaactgctctcttaatgcaacactcatgacaagcctgaattctacaaatgggtctcctttttcttatttttgtaatctcttaatgcctctcccctcctaactccaccctaattatgaatttaggcaaaccaagatttgggagaaaaatgatcttgattccacagcataaaaaaggctctcttctcgatgcactgatgacaaactcaagacaatgattagagacttcactttcatattcaatgggttttttcaaaaactaacgggatattaatgtatcagtcagttgcaaatgtcacataggcatttcaaaccttcctagcaaaaatttaagaaattggtgtgatggaatttactgactcacgttactggaaagttaaggagttgaaggttcagacctggctggaccgaacactcaaagaataccatgaatctcttttcattcctccattccacatttttctgtacaaactgcattcttaggcaggcctccctctcctctagcttaatccactctcaccacctgaacagggtcttcatcgcccagctttggccccctgatgggcacctgacccaacactgtggcaagagagctggattgctttagaccagtgctgtccagtataactttctgcactgatggatggaagtgttgtgtatttccacctgcccacggtcctgacagcctcatgcattgtcattaggtgttatcaggactctttgttatgccctgaccccagctgtcattatgattagtttttcaacaactagttgtacccaatacacatatgtgcaaggtgctgagggcttataggtggccaaaatcaggttgttttctgatcccatggagcttacgaatgataggtgagcgtgacattaaccaaatactggtgaggctaaaacttaactgagatatgtctctaggagagaaacatatggtcttatgggagcacataaaggtaagaagtaagctgacctatctgcttcaggaagggagtatgtggctattggggccaagggtaggggcttgacaatcaaggagaagagcccttgagctgacatttgaagaatacacaggcagtagattgcaggaagcaagtggggctgggaggccggggtcttctcaatctagggcagacttgtgcaaagattccacagaagaccagaatgctccaaggactgatggaacgccaggatgtctagagagagagtgcagatgtatggaggtataggtggggaattgcatgtaacaggacagatggaggggcagataatgaaaggcttgctagccttgctggctgtcaaaggtggttacgtttctcctgagaaatgtggaaacacactggtgagttctaagccagtaagtgacatgatcacatttggatctggaatagagcactgtgctaccgcatctagaaaacaattgaaggagggtgagaagaggaaaggagagaccagcagaggactcatgcgggggtctaggcaagatatagtggcagcctaagctgagatggtggggatggattcagaggcaatttcagaggtgaaacgaattggatttgctgacagcttaactactacaagtgagggataaggaggtattcaagatcccagcctttctgatttgtacacttggatggatggtgcagccattcacagaagaaggaacactggaaaagaaccaaatataaggaagaataacacaaattcagtgccagacatgcaagtcaggactatccatgtagagatgacagttagagaaatggtcttgagctcagagaaggctgcactaggggaataaatttgaaagtcaagggcatatagctgaatgttggagtgatggaaaggatgaaactacataggaagaaaagattgaaaaaagaaggcaaatttgaaggaagtcagctctaagaaacctcaatcattaatggtgcggtaaaaaggatgaacttacaaaacaggggagagaaacagcagccacagcaataggagggaaaccaggggaatgtggtgcaagagaagccaagagaagagagtggatttagaaggaaggagtagtcgagagtgccgagtttagctaagaagtcaactcaggcaagagtggaaaatgtgcataggatttaatgacaaaaagttcagcagtaacccttgcaaaacctgtctctatggagtgaccagggcagaagtcaaaagtgaatgggttgaagagtaaaatggaaaagaacggagaaacccactattgacaattcttccaagaactttagctggggagggggggggcagaaagttgagaaagagctgcaagaataatatatgagcaaaaagaagaggttgaggtttttatgggagagacataagcaattgcacatcaaggtctcagcccatcttttctcaggcaatattttaaaagcgcaactaattcattcaatacgtttggagaaaatatccactacgaggcttcaactttcaaaaatggttcacttgattaaccctaacttaggatgaagaaaattgatctgagaagtccctgagacaatggcatgctctcctattccaaaaatttcaagaacgtcatcttcctaagaagaataatgccataatctctttaaaatgaattttagttaaactgtctcttaaaacagaaaaagaaaacaagaaaactggaaactttttctttttgggtggcaagagcaatcaacagcataaaattctgaagtaggcttcaaaaaaagggaatagagaactacaaactactgcccaatgaaataaaagaggaaacaaacaaatgcaagaacattccatgctcatggataggaagaatcaatattgtgaaaatggccatactgcccaaggtaatttatagatttaatgccatccccaccaatctatcaatgactttcttcacagaatcggaaaaaactactttaaagttcatatggaaccaaaaaagagcctgcattgccaagtcaatcctaagccaaaagaacaaagctggaggcatcacactacctgacttcgaattatactacaagtttacagtaaccaaaacagcatggtactggtaccaaaacagagatatagaccaatggaacagaacagaggcttcagaaataataccacacatctacaaccatctgatctttgacaaacctgacaaaaacaagaaatggggaaaggattccctacttaataaatggtgctgggaaaactggctagccatatgtagaaagctgaaactggatcccttccttacaccctgtacaaaaattaattcaagatggattaaagacttaaatgttagacctaaaaccataaaaaccctagaagaaaacctaggcaataccatccaggacataggcatgggcaaagacttcatgtcctccaaaacaccaaaagcaatggcaacaaaagccaaaattgacaaatgggatctaattaaactaaagagcttctgcacagcaaaagaaactaccatcagtgtgaacaggcaacctacaaaatgggagaaaatttttgcaatctacccatctgacaaagggctaatatccagaatctacaaagaacttaaacaaatttacaagaaaaaaatcaaacaaccccatcaacaagtgggcaaaggatatgaacagacacttctcaaaagaagatatttatgcagccaacagacatgttacaaaatgctcgtcattactggccatcagagaaatgcaaatcaaaactataatgagatactatctcccaccagttagaatggcaatcattaaaaagtcaggaaacaacaggtgctggagaagatgtggagaaataggaacacttttacactgttggcgggactgtaaactggttcaaccattgtggaagacagtgtgacgattcctcaaggatctggaactagaaataccatttgacccagccatcccattactgggtatatacccaaaggattctaaatcatgctgctataaagacacatgcacacaaatgtttattgcggcactattcacaatagcaaagacttggaaccaacccaaatgtccatcaatgatagtctggattcagaaaatgtggcacatatacaccatggaatactatgcagccataaaaaaaaaggatgagttcatgtcctttgtagggacatggataaagctggaaaccagcattctgagcaaactattgcaaggatagaaaaccaaacaccgcaggttctcactcataggtggcaattgaacaatgagaacacttggacacagggtggggaacatcacacactggggcctgtcatgggagggatagcattaggagatatacctaatataaatgacgagttactgggtgcagcacaccaacatggcacatgtatacatatgtaacaaacctgcacattgtgcacatgtaccctagaacttaaagtataataataataataataaaagggaataaagtcaaagctggtgactatgagaataaaatgtcagtccagattaaaggaacaattaatgatgactggaagctgagaggatgttcaatcatgagctgcacaacctagagctcaccagagtcattagctttggatgggttcttagaacttccagggaatcagagaagggcctggagattagaaatgggctgcacatactgtatgtttcacaagcgttaattttatgtgctttcagaaaggatgtcattctagtcaacattgtgaaaggatacatcattggtgattctttttttttttttcatttttttcttacttttaactgacaagtgaaaattgcttatatttatggtatataacgtgttgatatacatatacattgtggaatggctaaatcaatctatttagcatattcattattcattctttatgtgactataatatgttaaagacacaaggaatacaatcacagttacttgttttaacgactttattacgggtatatttgcataccatagactttacccatttttaggatacaaatgagtgatttttagtaaacttgctgagttgagcaacatcaccattatccagttttctaacattttcatcatcccaataaaatccctaatgcctgtttatagttattcccatttccacctctaatcccaggccactactaatctgcttgtccccatagatttgtcttctctggatattttttagaagtagtggcatactgtatgttgtcttttatgtctgacttcttccacctatgtcatgcttttgaggctcattcatatggcacatgtaccaattttgtattcctttttattgcttaatagtaatttattgtatggatatactatattttgtctgtctagtcatcatctgatggacattaagttgtttgcatttttagcaattatgaataatgcttctataaatattcactttcaagtctttgtgtggacatatgtttcttctagggtagacatttaggggagaaattgctagatcatatggtaaatttatgtttaacttttaaacaaacttcccattttccataatggcagtactgcgatagtactttgaagctgcctactgcatctcctttaagaatatagaagtattgtgctaggtgctggcatataaagatgaacaagtcagtttctgcccataagcattatacagtctaatagccaaaataattatagatataattacaaagttgaggaaatgaagtcgcttccttttctgtctaactagtagagtctactggggttttacataattaagattgtctgaaaccaaaacagagaaagctaaaggcttcttcctttcagacacgtattaagtacttgatatatttctgacagaaatcagagctaaagatggccttctgccagaagttgagttcagctgcatgaaacagaaaatcccacataatgagagcttaaagaaataaaggattatttttctgtgatacaacttgaaacctaaaggtaagcaattcagggctgggactacctctctctaaagtcatctgagattcagaagtctttcaggtttgggctccacattcacaggatcaggcccttgtcttcacacttataaaatgagggatagagctccagcctttacatcatcattccaggcagtaaaaaggagaaacagtcaagagcagaagagtttgtgcctgttgaagtttgctggctgggttacttgaattgcctccctggaacttccatagaagacttcccttacatcactgtcaagtattggatcatgtagctacctggtcttcaagggaggctggcacattagtattgcagctggacatgctcttgccccagtaaagcaggagtccattggtgaggaagaagagaataggtattgtgtggacaacccacagccctgacttctaggagtaagtaatcaagcaagggaaagagtatgccaaagaagcctggtgcacaggaggtcttctgtagtccttaatttggaccctattcccctaaagctgaacttgtgacagagacttgggagcatgtaatttatttgagaggtgatcctgggaaacaggtctgagggcttagagagaatgagatggatacggagcaaaagccaattataagacacattatcaagcagttgcagtaggtgatggaggttcaggggatatctgggaagcatacacagcatctgccattgtccacctgcaggatgggggagctgaagaatgtatctattgcctctggccctcattagttgagcgttgcccctggggtcatttactcccccctcatttccaggttgaactttgtcagatgaggaatgccacacacacacacaccagggaagactctggggcagaatgtgttcgtcacccttaaagtggcaccctggcagtgtaagttgaatctgagctcccacggaactgggggagctgtccagcaaacggctgttgaaatcagaggtaagctgggtgcagggacacaggcatcagcagcatctgcccctcatgaaaagttcatatttataataaaatctaatcgttgtgttctaacatgactgctggccaaactgtcccccttttcgtggcatggatgtgacctctaattatgcaatattctgcatgtcatttttaaaacagctttgttgagatagcgtcaatataccatacaattcacctaaagtggacaattcaatggatttttagtgtattttagtattttcactaatgactaatcatattgagtcttttttcatgtgcttgttggacatgtgatatcttcctcggtgaaatgtctattcaaatcctttgcttccaatcattaaattgggcaatatgtctttttgttataatattaaattgtaaatgttctctatgtattccagatacatgtcccttatcagatatctgatttgtaattactttctcccattctttgtgttgtcttctcatttttgtggcatcttttaaaacacaaaagttgttaattttgaggaagtccaatttacttttttttttttttttttgagacagtgtctcgttcgctctgttgcccaggctggagtgcagtggtgcaatctcagctcactacaacctctgatacctgggttcaagcaattctcttgtctcagccactcgagtagctgggattataggcgtgcaccaccacacctggctaatttttgtattattagtagaggagacagggttttgccatgttggccaggctggtcttaaactcctgacctcaggtgatccacctgcctcagcctcccaaagtgctaggattacaggcatgagccaccatgcctggcccactttttttttctcttgttgcttgtgcttttgagagtggggaaggagtactgaaccctgtcagcttgtcagcaaggagaaagggtggtaaattagtgtatgaaatttaagaaaagctgtaaaaaatagttgacatttaagctggatcttgaagaataaggagggtataccagtcacaaaattgaggaagagcttttcaggcaaagagaccacctgggttcattatctcctagaataagaatctccttgttacatttattataactgattcaaaacagacacccccacatatgccaacaacatacggtaaacactgacagagactgtcatgtcctacaattgttattaataaagccaattcattcatgcaagattcagttaaaacgtaatgctgcatctgtgcaactcccccaggaaagtgggaagtagtgtttggagaagaccaaataaacactcatgagtgatgatgatacctctgaggacacagattttaagtactaggtcccagctgctctctttgaaggatgcacacgaccagagaatgaaagcaggaaaaggtggtcagtgctcagcacgtgccaagcacagagcaggaaaagacctagtagataatgaatggtccctgccttatagtctagctttacatgtatgactcatgcccttgaaaccacagactggatgtgaccctgagggtaagagaagttcccaaaaggattaagaatgtgtttttttccaacctagaagaatggtggcttggcatcagaaattaagtcgttctgttgaaaataaacagaagtggaaatgtatattcagggcaacttaaactcatgctcttgacaaaatatttttttaaaaaaagcaaataaacaaaagtatttctcatgcccctcagttcatagacagaaactcataccaacaggctttttttttattttagtaagaactgccaaatggtgaaactattcacaaacactagaaatgcatgagagtgtcctcccgatattcttacctgaattttgcatctttttatctcttgtcaatctagctgggaaaacgatattaaaatctcattttgactggcatttccccaacttcctagatggcttcacatcttttcatgtttattaaccatttgcatcttctcttcagtaaattattatttatatcctttgcccaattttcttaggggtaatttatctttttctagttaatgtgaaagtagtctttgtatgtaagagatagtaactttacctatagcaaatattttcattctgtttttcttttaacttagttcagggtgtttttccatactaaattttggattgctcatcttgcttaagatctttccaccccaaggatcctaagttttcttctatttccatatgcatatttttaatatttctcacacctacacacacatacatagttacatggagagatggatcattaattcacctagaatgtgcgtgtgtgtgtgtgtgtgtgtgtgtgtgtgtgtgtgtagggatgagaagactcagtgttttctgagttcatatgatctacatggggaatcagatctaacatggaccaagtgttaaaccatacttccaagaacaacactacattagtaggccacctgctaacttctgcctttcacattttccagcttaaaacatctccatcctccccattatgtaagaaagaagtacaggtgtttctgactgctccctctcccatgatcccataacccatcagttctgaagctgcattatccaaccttctgaatctctctgaccaccctccaagtcttccaagtccccatggccactcccttgctccaggccaccatcatctcaccctgggtctttgcaacaccctctgccccggactccctggcctacatgctcagtctgtctaattcattctccaccctgcaaccaggaatatttctaaaatgcagaccccatctcattcctgccctacctatgtttcttccacagtccccattgctgtcaaggtactgtccaaattctcacatctggctgaggctgtccttcaggattcaggcacctctcaactttttaagaaactgtgcagcctcatttctcagattgtgtctcctatttccatgctctgaccagagcagactactttcagcactttcaaaagcccaagattctttttcagtggagctcaactgtgactatgccccagctcacctgtcaaaaattgcaaacacacttgttcaggtcttacacctgggtgattctgactccgcgggtcaaatgggatctccacatccacaatctgtgatgacttctatggccagggtgctctctgcctccaggctgcagacgtgtgattccctctgcctggagtcctcttctacctcctccagctccagcccccaccccaccacccaccccaaactggatatgacctcttcctccttgaagtcaaagcataggtgctccttcctccaggaactttgacagtccgggttagggctcttcctctttgcatccctggtttcctggactttcctgattcaagcatttattgattcctcttcttccaccccagactctgagttcggggaagcctgagatagtggctgttgtcttgctcaccactgtatttcctgcactcagcagagacctgacacatagtaggcgctcaataaatgtttgctaaacaacaacaacaaatgaatgaactaacaaataaacaaacaaatgaacagatgagtggatgcctgtggcagtttccatgacaaacacaaagggctaagccaagccagcaagcagacagccgtgcggcctgcagagggcactagtctgcttcttaatctccctgcagaatcctcagggccaggtacctgctgtcagtcagagaggtgcccgatgctcagtggtcattctgctgcgctgaagattaagtaggagttgtttgcccttggccaatatgaaaaacctgagtgttctcccttcacttctagcgacaagtaacacatcccctgtcttgccatgaaaagagctgtaactgtagcagccggtggcaggttttctgttcccaggtggggaagtgaggagagacaaacagaggggtgagagggagacagaaggaagacagctggtaagagaccctatggtgtattttttctatgtaaacaagataaaaactgctcctcctggaacagcaaagttctccctatgtctccaagctacaaacttgcatgctagctactaactagctactctccctctctctctctcttcccccttcgctctttctctctgtgtgtatgtctctctctctctctgtctcttcctccaccctctctcactatctgtctctctaccctccccatccttttattctagaggagaataaactctaaggccagattgaatgagcatccaaaagacgtatctggagggagattttgtctttcctgtgagcagcagcagcttcctacggaccctgctggagccccagctcggatcagcccttctgacagcaatgaatgcttcgtgctgcctgccctctgttcagccaacactgcctaatggctcggagcacctccaagcccctttcttcagcaaccagagcagcagcgccttctgtgagcaggtcttcatcaagcccgaggttttcctgtctctgggcatcgtcagtctgctggaaaacatcctggttatcctggccgtggtcaggaacggcaacctgcactccccgatgtacttctttctctgcagcctggcggtggccgacatgctggtaagtgtgtccaatgccctggagaccatcatgatcgccatcgtccacagcgactacctgaccttcgaggaccagtttatccagcacatggacaacatcttcgactccatgatctgcatctccctggtggcctccatctgcaacctcctggccatcgccgtcgacaggtacgtcaccatcttttacgcgctccgctaccacagcatcatgaccgtgaggaaggccctcaccttgatcgtggccatctgggtctgctgcggcgtctgtggcgtggtgttcatcgtctactcggagagcaaaatggtcattgtgtgcctcatcaccatgttcttcgccatgatgctcctcatgggcaccctctacgtgcacatgttcctctttgcgcggctgcacgtcaagcgcatagcagcactgccacctgccgacggggtggccccacagcaacactcatgcatgaagggggcagtcaccatcaccattctcctgggcgtgttcatcttctgctgggcccccttcttcctccacctggtcctcatcatcacctgccccaccaacccctactgcatctgctacactgcccacttcaacacctacctggtcctcatcatgtgcaactccgtcatcgacccactcatctacgctttccggagcctggaattgcgcaacacctttagggagattctctgtggctgcaacggcatgaacttgggataggatgcagggccatggaaatgatcatcagtcgggtcacttttgactttccatccacgtgaggtgtttagaaagaaaaatatatatacttagaaaatataaaaatgtgttaacagccatgattgtacttgtcgtttgtttttaagtttacaaagccttttaaaggggaaaattggtgaacaacagattctctgaaaggattccaagatgggtaagtcacaaactctgatttcccaaatagtcactgggagaaatcagcgaaggcttctctgcatgctctctgcactcatttccaaacacccagggtgtgcgacgcctgtctgctcatctgctccacacccacgtcttcatgctccaggccagaccagactgaaggattctcatgaacaataagggtggttcagatctcttgcaagcaaacctgttacagctacgacctcctgctgccagctacacggagagatagctttgcacttataactccgtaggagactgagttctactctattattctatttacagttagacaattgtctctttgtgaaaggagcaatgctatgccgttttccccttttcttacccccatatcccttcagttgtccccacccccaaaggtagcatgaggatgtaacccacttctatttttctgttgttgtgttggtgtgtgttgttgttttgtttttatggattaaatctaagacaaccttcaaaactctaacgaaagagagaaagtgctttggacaatcagaatatacttgtgtacgtgtattttgataccttgctattttaaggtatagattaatctttttaaaataacttctttttttctatcatttacttttagcctttaaaacaagaaaggaaatcatgggttggggtacatgtatatacgtgtgtgtgtgtgtgtgtgtgtgtgtgtgtgtgtgtgtgtatcacaagaaattgctttactgtagcttaagatagtttgagaaaccgtagaaccactgtgtgactttcttgggagcccttgtttttgcttatagtaattgcatctctatcacaggacttcttcaatattatctatgaaagagaaagtttttttgttcttttccctttttgcttggcattgtgttaaagttgagtgaccctgttatcaatgtctatatcctatcaagtacaggaattcattcctgggagcaaagggtgagactggctgactagtgctcgcattgtcagatccttttctgcccaagataacttcaatttgtgctttctggctgtccccatatctccccctgtcacaaattcttatattaagctgtgtcttggggtgcaattgtgtgtttatcttgcactagcatatactggggttctttaatacttgaagattttctgctaatataagcaaaaccattcctttcttgctttggttatgatgtttggaaataataaaaagcttttatggctgctaaacgtgtgttacattgaaatacaccctggaatcattctggtgactcctgcacacggccatggtatgtttcactgcaattcagtgatgactttgtaagtggcataaacagctccattgatcacagtgctagtcttttctagggcaatgccttttagccaaactacaaaactctcccatttagtttccaaaaataccaggtttgtggttcccgggccactgtcgttctccattattttaatcaagacactaaattacaggactttccatggccgctcagtgggtaaatgtagagaatggggaatctaattacttgaaagtgatatgaatagctatagggattatgtcttttttctatgtaaacaagataaaaataacttacttttcactcttatatcagttttcacactatttcattttatcccattagcaaacctctaaaataggtgagtcattttacaaatgaagaaatttagccttggaggggtgatatggttgtccaggagcacccacctagttagggtcatggtatattctgcatcctggggctgatgtccttttgcaccaatatgctgctgccagcaggttttcatcatcaaaactagtccccctctcctccctgtatgttttagcttgcaggggcacttccaaactggaaggcccacgagcatcacctgggatcctgtgcaagtgcagaatctgattcggcaggtccaaggtagggactaagagtctgcatttctaactccgacaagctcctcggggacgtggctgctggttgggggtccccatcttaaagagcaagggcatagaggattttcaaatgagtattatgcgaagtaaaagtactcttctgcctagaatgctgaccccacgccagggactgtgctaagcacttcacaggcatttgctccttgtgataaccctaccaggtagataccatggttatcctgattttgcagatgagctatgtgaaactcggagaggttaaggagcttgtctataggaactcggccagcaagtagagatagggagattcaggctggccagcccccacccccaaatccaaccagtgtcctagcccctctcatgatgacacaggaacctttgaactgggacccaatgacttgggagccacgtgtcgccatgcagagagaacttgatgcatgtttctaccacacacaggtccagatgttcccagcagagtttccagagagatgtcataaaaatcaaaaggcacaattaattctttaacttgctataaattttccaaagtctgtgagtagccctggggagtgcatcaaagaggtaagttactaaagcatccgtttccctagtgaacaaccctgaacgctggggtgccactgtctcctccgcgaccactttctcagattctcaagtgggaactcaccagatgttttaagcggcaggacagtcatgtttgaaaatgcttaattgttggaagtaaaagcacaccatgattttagctcatctgttaattcatttatcgattttcacccccatccccaaggcagaatccctgcagtacttgattctctgagtcctgagaagttgttgcctgttgtccttatttaagatgaacttttgaatttaattttgaaatctttctatagaggctgggtgctaaaacatacgctagcctctctggctgaaaacattttttaattcacgctcacctccactaaaatccattctccacatagcagctagtgcaattatttaaaaatataaatcagattatattacacttctgctcaaaactcttcagtgtctcccattaccttttgaataaaagcccagttccttacccagccctgctaaactctagtcatctgatctcttctgctaactctccagcctccccttacaccatgcctctgccccgccccaaaccagactcgcatttgccatatgctcctctctgccccagggcctttgcaaccactgttccccctgcctcgggtctctacctcagatcttcctggcacatgctccttcttatcagcctccagcccaaatcctcagagatgccttccctgactgcgctctctaaaggaggacctcagtcactcacaccatcactgttttatcacagctcttattactattttatattttcttgttaatttatttgattaattctcatcaatctctctcaccagaaagtagtgcctaggagataaaaatagtcaataaaaatatgtgactttattaacacatttaaatatgagctcaaatctaaccaaagagaatatagcacactggagattctcaaattttggtgactgtcagcaccatgtgaagtttgagaaagacagcctgttccctgaatctcatgatccaatagatcagaggtcatctccagatatctgaaaattttaaaatccacaggtgattttccgagtttggtatacacggtgtatgatgtacaccaaactcagaaaaccaccaaaaccaacaagttctgattattatccttaaagaataacaaaaatcaacacctcaggagcttacatgtctgccctatcaccccttcctgtcatcctttcaggtcggggtgtcacctaccttaaattaatgttggatcatccaaaaaccaaggcaaatctagaaacttggaagaaccagataacgaaatgcagaatacaagataaacccttcaatcagagaactcaacctttcatatctaagagcatttatttaggagccaaatcaacaaaaataataacaaaagacatgatatggtgtttattatgtggctgatactttactaagcacctaggtatattaacttatttaatcctcgccaaaaccccgtaaggcaggcacttttacctcttgtcctatagataaggaatctgtggatcacagacgtgaatcatcttgactgtcttgaccgatactactcagcagggatgaggcagagctgagatgattggaaaatgaccactaacgctacaggcttaaagaagcacttacacattgaatccacttttctttaatcatcagagatgtggataaaaaccaacacacaaggacacccaaggcggtagtgccagcaagggaaaaaaaggctttggaggaggagccaggcagcgctgggtgtgcatccttaggcaagtctcttgacctctgggcacctcattggcttatctgcaaggtgggagctccacctacttacatggcagcaagcagctgtgatgattcagtgaagtataacaatgtccaaaaataattagcacgtgaacttcacgtcccctttccccttcgcttgctggactctagacatttctgaagttgcctgcagttttcctgcccctcgtctctgaggttcctgaaaacagcagttattaatgaggggaaggagaggagaaggtgaaagtttagcctaatgtttctacaagtacaaagtgaattccacgggaggcatacaagatggtttgtgatgagtacacatatcaacacgtgcccacttttttttcacagaataactttccaagtaaacaacaatttgaatattttaaagtgtattaacataatatgtatgtctgaatgtatattatattgtttataaaactcatgatttttaaaatagtattgctaaacatgagacttgagtggtacctgcaaagaaagaagtgagttgactaggataaaattaaataaagccggcgatgtggctcacacctgtaatcccagcaccttggaaggctgaggtgggtggattacctgaggccaggagttcgagaccagcctagccaacatggtgaaaccccgtctctactaaaaaacacaaaaacttgctgggtatggtggagcacgcctgtaatctcagcaccttgggaggctgaggtgggtggattacttgaggccaggagttcgagaccagcctagccaacatggtgaaaccctgtctctactaaaaaatacaaaaattagctgggcacggtggagcatgcctgtaatctcagctactcaggagactgaggcacaagaatcacttgaacccaggaggcagaggttgcagtgagtcaagatcgcaccactgcactccagcctgggcaatagagcaagactgtctccaaaggaaaaaaaaaattaaattaatgggatacaggcattttaaaattcagaataggaatgtttgaaaaattgaagtttgagaaaacctatgctcaaaataaaaccattagaggagagggggagtaaggcccagaaataaggcaggagaggagaggaagtcaagaataccactgagactgggccaagaaagaagctgccatccatgtgatgggtccacagagaaggatagatcgagtcaggattctcaagcagtttggctgtgcaattggcatgtattctctgaccccttggcattctctggagagaatgcactaaatattttcactgcatttcacctgagtttctcagcctcaacatcactgacatttggaagcagctcattctctgttgtaggaggctgtcctgtgctgttagcatgtttagtagcatctccggcctctacccatgagatgccagtaactccccaaatcctaacacatgacaaaaatgtctccagacattgccaaatgttctcagggggatgaaatggcctgcattaccctcattttgttcctctccaccttatttctttgactgtgatgccacattgggacagaaccacatgggggcctgattttatgcaggctgccaaggtggtgtatgtgaacatccaatcacatgcctggaaaatagtgctcagaaaaaggtgctattgtactacgttaaataatccactaattcaaaagagcaaagggagcatgttaagcccttatgtgtcacattaacatggaccaccttaaaccaagctttctgggatgagcaaaatggcttcagcaatgctccccaggccccagagactccccatcagagaacttactacactgtttcatttttctgctaacttctcctttctaccaggctgttaaccaaaagttgaaagcatattaggacacggataaattcaacaaatggctgagtgagatttgtggctcactcctgtaatcccagcactttgggaggtcaaaataggaagactgcttggggccaggagttccagactagcctgggcaatatagccaggcatggtggcatgcacctgtagtcccagctacttgggaggctgaggtgggaggattgcttgacaagcccaggagttggaggctgcagtgagccatgattgcaccactgcactctagtctggggaacagaacaagactctgtctcaagaaaaaaaaatcaacaaatgtaagcacggacctctgacccaggggtttgcaactaatggcacagaggcaaaaggaaaatcttgaagccctagagctcccttctgattttgttgtccagtctctgaggtcaggcagacccatgttcaaatcctgcatcttttacttgctgtgtgatgatcactgaggttcagcctcctcacctgtaaaatgggataataatgaccatgcactttaaaacctgttttaaaaagcaaagtaaaatcaatgcaaaggaccccacatggcagctgaaataaaaggcgcacaataaatgctctctgtatccagcacagatgataagcaaaccctggacacaatctccttggtggtcaggatttctctggaaggaatttcagcctccgtttcaacagtcaccaaggacaagtgcaaggttgtcacttttagactaagaagtgatgcaaagtaagctctcatgagccaagtgggaatccagcagctgctaaatgggaattttattttataattaaattcttcattatttggcataacaggggctttggcaggggggttcgtagcattctatatgctatccatttgtgaacgtttgttaagcttttgtttctgaaaactttgtaagaacttacaaaatgttctttcaaatgctccattttgccatcttgttaattaggccgtgctgaaatcaagtctacacccccagagctctctgctgagtggaagcaaagaatttggctaatgatatgagctgctcaagccagaaacacacatttcccatgaaataccccaataatcagttcatttctctaagcactctacagagcacaggcctaagcaccgaaatagatacatgtacaatcctgccagtgtgtttgttttttattagggggaaagaatccttcctagtgtttttctcattgcttctgtgatgtgtgctggattttgaagaggctggcacatcccactcagcatcagaaagaacacagagcaaagtcacaggtggtcctcagggtaactatcagagagtggctgtgaaggactctgtttatcaggaaagaagaaactgtttcctcaccctgaaaagatgcgggtgccaagtggaggaaaccaagctgaaattcaggagagcctgggaccaggcgtggctcaaggctcgtatgacatgagcaagtctattgttatcttgtgggtttcagtcataccatctacgcgactggcagagctggattccgaatccaatgtgtggttttcaaccctcatccttgtctgtggtggtcacaggtcacggctgccacagcactgtgtttcaggtgaaacaaactccacctcaacaccagccccaaggcaagtgtctggcccacacctgaccaactggagtcctctatctcttggccacagcagccaggtccatgacctaagacagcctggggagactcaataataccatccttgaaatactaagacaaagagaggacttcctcccccaagccttttgttaccaagctacctgaggcttaaggagtgagggaccagtctattagaggatgaagccaacatcaaagaaagcaggcaaaagaaagagaggagatttttgatcctagaatttgagcaccatgatccagctacgcctgaagctagtccagaatttcagttactgagctatttgtcatttttaaccaacagtattctgacacatgtggagaccaatgtattgattcttcagaggccagtgtcagtgttaagggggacaagaagaaaccaggtcagggaaaggggagaatagagggaccttgagtgagaagaatggctccaagctcaatgagaccacctctatctcgatctgctttgcatagtgagtttacacattttcaaaaaagaattagctaaaaaccacacaaacaaaagcaaacccctagagtagatgatttaaagtaacgtctgatctgccatcctatttatactaagaataaacaggcagaacttcactgaaacatttctaattaaagtatgaaaatgaaggtagaaaattgaacaacagaaccagcatttctactgtgtttagccactggtttcctttttggtgacccccatgatttctggatggcactgcaccaaaccatttctcatgtgctatggtaactataaaatataataacattaagacaagctgggttttcttggcagccaaatggctagggaaagacaggtttccaatgggtggaggctctaagatgctcagtgagtggctgcatctccagggtttgtggaccagccagtgaagagctcagagtctttgcagaagaaggcaaaggatggtgattcagagctgcatggaggaaagtggagagaagaaatgaggagggcttagaagtctcatggtgatgtctcctaagctgtttgctgcatggggtgcaaaggaacctcttctctcgtcacaaaaccttcagtaaaatgcatgagtcaccagtgcttaaagcaatggatgtagtcgttgggagagaaacaacatgctgagttcaacttcaaggttggccgacagcataaactatgggtgcccagaggaagcagaagacattcaatatttatatctttctcctcttccctcccatcttcccaccacccctccacactgagagggccatgaggaggcaggctttacctcattcatctccaagttcaccccagtgcctggcccgcaacctggtccaaagcagactcagaaaatgtctgaggactgagcaaatgaataaatgagggcaacttgggactccctagttaattcattcaaaaagatgaacagtgtaacatagagctaccatgaattttagatgagggcaagacctgaattccatctgggatcatgcttctcattgcctctcaccagcatggggccatttatttctgtttcctccccaagaaaaatgggaataatcataacatctaggtcaaggattgtttagatatttcaacaaagtaatacatataaggcttctcagcacactgcctagcatccattagtatttgtactattgctaatattaccatgaaagaatattagtgggtcaccatagtacattctgggcacaaaccacagggcttttcaaatagaaatgtgtacccaaatcccctgggaatcttgttgaaatgcagattctgatccacaggcctggggtggggcctggcactccacatttctagcagacaccattgatgccaatgctgctgttctgaggcccatgcttggcatggcgaggcctcccacaaccaagacagcagaacagaggacaagccaacccacagctggaaatcatagctaacacagctccttcccaaagcaaccgtatccactcaatcctgtaagaccaaaggaaatgcctagggaaatcaaaagagatcataattaaatgaaattttcttgcatttttcttcatacaggattagtttccgtctcccctctctcatcctcctctggcagcctctccacagcacccatttgtttgggatgaaatgatgcagataggtgagttatcaacattccagacatgggcatgaatcaccagcaaacagtccaccctctgagtcacccatctctgagatgattccatcaatacaaaatcccaccagaaaactccaaaaagaggaaaaatgagctatcaagcaagaaaggcatggagcaatgggaagagaggatggcaagtgagggtgagtcaaggcgcccagcactacttgcactggctctaggtgaactagcaccactgagagaagtggttctcaaatttggaggcaactgcaaaactttaaacatagtgattctaggtcctatccctcagagcatttgatttaattggagggaagtgcacaccagatggagggattatttttaaaaagctccaatgtgacacttcggagaactggcatcagtcggctcaggatgggaatgccatcagtgctgggcaatgctcaccccactaagccaagggtttcccttctgtaaaatgggatgaataatttgcttcaggactgtggtgaacatcacggataaaaagtcccaacagtctccttggcaaacattcatcattcctatgcattttcctgccaggataagaccttatctttttgaacgcatatctcatctataatttcaagccaatttagcaagtatatcttatatataatttcaagccaatttagcaatcaccaactttgcaattgcttgttttcagatgatgttaggcttcaactatcctacttggcacataaaacctgtaccttctttctgagcctactctttcttcttctccaagcctgaatttccttcttttctgtcaacacaggttgagtgtttaacatggaccaggtgcttggaatgcagccgagaataagatagcccggtcctcacaaagtctacagggcaggtaaagcgacaccccttggacaagcatagtttggattcttcttaaagtgaaagtttgcagggaaagggaacagaaagctacagatggattgatctcttcactgtgtctctttaacccaatcgtttagcatttctgtgcctcagtttccccatctgtaacaggaatggttcttgtacttaccagctgacactgggcaggtaaacagactctgaagatgataagaactccttatcaagcacgttttatgttaaccaagacttttctcccaatctcagatcactttgctaagggggaactaaaaaggaagcaaagatttagtgcagaggcaaacagattgttttctgtgttctaaagctcagccagaaacacttgtgcaggtaagaacttcctccacaacactgaggaacaagagacagcatgccacttttaaatcaaattctgatgacccctatttattccagacacaagcagagtcaaggctctttccactgcaggcaacaaaatctcatctcaaacttgagcaaaaaacagcatggagaggggatacttattcaggccctgcttcatctgcgtagtgaaatgatatcatcggaaatctttccttctgtgtgtcccaagaacattcccttcttttgtttttttctctaacaggttacttttactatcagctcaccaactccaggagaaaaccagctactctttcccaatagtctccctattcatgtccctctgcctcaaaaaacgaatacaaacttcaggccagctaactcaaatctatgccagcctgaactaatcaccacgagcagcatcttcactcaggccaagataaaaccacaccctggagctagtgatggggcaacagccacacccaagccacatggaccagcagagacggagaggaagtctcccacaagagaattgggtgctgattccaaaaaaaaggcaagcaaaaccagtcactgtccacctttctctcttattctactctgttagtccccaacactttggctcttttataggctttctttgcacaatccactcattcttgcaggctgcaggggttcttttgcttgctctaaaatacagctggtaatttctagatggcaatttagtacatccattttaaaatactaaaccatcttctaaaacttatatccaaatccacagatatacatgataggaaaaatgcttagttttgtagtgagtattcctacaagttgagtttttcagttctttctttctaacatttaagggcttgcataagctagcctgctaaatggtttgtttctcatgcctcgtcttgtccttggtttcataataccactagactgaagctttgatttttctgggccacagtactgctcagaactaatcaaatggatgtgtgttatgaatcaaaaaaaataagtaaattgtatcttaactcttaaagcaggagtataaaataaaaacaggtgaaccatttcctcaatttttattcaattttaaaactatcctttcccactccaacttacacacatacagttagattattaaaaataaaaaaggtatgcaagcaaatttattttattttatttatgtatttatttatttatgagatggagtcttgctctgtcacccaggctggagtgttgcggcacaatctctgctcactgcaacctctgcctcccaggttcaagcgattctccttcctcagcctccccagtagctgggattacaggtgcctgccaccacgcctagctaatgtttgtatttttagtagagacagggtttcaccatgttgaccaggccggtcttgaactcctgacctcaggtgatcctcccacctcagcctcccaaagtgctgagattacaggcatgagccaccacgtccaccctgtgcaaattttctagtaggaatttttgtaataaccaaaattgaaaagccaaaacgtccattcactggtgaagggataaacaaaatgtggcacatctgtatgatgaaataatagtcagctataaaaaggactggattgcatttacaacacgattgaccctcagaaacattctgctaagtgaaagaaggcagacacacacaagactagattttgtatgactttatgaaatatctagaaaaggcaaattcatggagacagagggtagattcgtggttttctgggcttgggggaggcagcagggattaactatgaacaggtatgggggtcttattggggtggcagaaatgtcctgatactggaatgtagtgatggctacaggactcactaagaaactaaaaaataattgacccttcacttaaaatgagggaattttataggaataaattatacctcaacaaagttgttctagcagttaaaagacaaatgaaatgagataatgtgcctgttgctccattgcaatggtcagtgacccacctacccgtattagcaggatgtccagaccatgcccctgaagacactccgataccttccacttttgttaagattacagagggaaggttcagttctgctcatatctatctccaagaacaaattaggtcccagctttttgagactagggacaaccacagcgagaatcccactaccccaacattacaccccaccccaaagtggcccagactcccagtacatcatggccaggccccttaaacttactgaagctgcagacttccagggcataaacctcccacagcttggcctcctttttggcaacctaaaaccagcactcagacctactcccagttccatggcagacccaacctccacgggctatttcattcatcccctatgtaggtcgccagataaaataaaggatgcccagttaaatctgattgcaaataaacaaatcatcatcttatatagtttaagcgtattccaaatattgcacaggacatacactttaaaaactgccatttatttggcaaccctacaaaggaaatgaatgaggtaattcaagtgagatgtgtttttatttgctaaatcgagcaactccatccccacagctattttctatttcttggtacttttcttttccctgtccctaggtcttagcgggaaccccgtccccccaaacccagtaagtctttctaacttgaaatctcagggatgcctggctggctgtttgatttccctcactgtactgcttccgtccttcccaggagcagcctgggcagtttccacatggagcaacaggcattctgggaactgaaagcagctcgtaggactggagcacagagggcttgtttaggaacagagagtgacatggctggagagtcagacatgcctcgtcatggggaaagaagaactttatatggcatcccgagggctctggatggatttctgtaagtgatggaatgccaaaaatgaaatctgggcagtgaagtaacacaatgtgttggatgtgtaggaaagatgacttaggtgatagaatggagcagttaggaggcggtggtaatagtccaggtgagagatggccagctctgtgattattaacagcatcactcatttccatgtcatagtcttgacaaccttctacacttgtatctcattttcctattagaatagttaaaggcatttttgaatataattagatcttcctgatcattctgtggagatctatgtgcatcattatccatctattcctgttcatgataaagatctctcaaaataatcatggaatttgctagattttactgtaattggctataaaaatacataaaatcattgcattaaaaaaaaaatcccagggagaagcaactgtgttgtcaaccttttcccttccagaagcccccatggcctgttatgttaactggtcctctcacccacatgctctgtattccagaagtaagatcagccttgctaaggttgtgaagtcctacaaaaactctgttctcccctttcccctgatcaagggagcctcttacctcacactggtgtacctaagagaaacctagagcatctctctggtggcctctcttgccgagaaaatagatacatagtttaatgcatgctctatctttgctcaagaaacacctgttagtgttaatatttacaatttctcaagcaaccacattgtgctggaatcttctcaggtgttacttctaatctcaacaacaaccttgcaaacagagtataacattcccattctacaaaggagaaaaccaaggctcagacagtcatgtcactcctgcagcactcgatttagcactgtattaaagctcccacaacagttaggaagatgtgattctaatatctttctattctctgaggtgagggattgtggcaaacagtaatgactataaccataaagagaattaatatgtgctgggaggccaccgtacaccaagcaccattccagttgctttaaattgacaaacttatttaatttcatgtttatttaaatcctcttcatgcctcaggtgccagacactgtgcgctgaaaactatctgcagagatctcaatttgcaccgttcgagtccatcatgccattttctcttttcattttatttaatcttcaaaaaaaaaaaccacacacacagaaatcttcttcattttgttggtgctgatactgaggctcagagaggcaggtaacttagccagggtcacacagctagaaagcagcaaagccaagaggcacgcccaggtctgagcccaaagcctgagctgtttctgatgcgaggagtaaaatgggggtgagggtggggggaagatcgccatcatttcatcataaaaacacattttcaaaggatttgaaagtgtacaccatttaataaaggaaacactagcatgtgtttagaaaataaccaaacctcaaagtctaaaatgtgtgcctaatatccaagagcaattttgataagatggacacacccttttaatggataaattcaaacttctgaaaagaaaaagaccaaaatctgtctagctttactttcctatgactggatagcgattagatgttcggtacacacacaaaaaaaattaaattaaatgggacaggaagtgactgttgctgcttgggggaaaaagcttagtaattacacattcttcaaaatgaaaggtcagactgtcctaccccagtgaaattgtcacacgagccattagccatttaagccaatgaagttctgtcttcggtgttttgatcgatttcaaaagctgttcttagtttccagtgccttgctcttcttggtcctgaacactctgtgcagggaaaaaagccacactagaagagcaaaccactgcatcaagtgaaccctttatgagcagagatgctaaatctgagacacattgacccacgtcatttgcagtctgcgtcttcgcctccttctcaagtgcccaaagataacctgcctgaaggaagacgtgctgaccagaaagagttaacaccactctcaggatcctcctgcagtcttgtacaggtgtcattttggggtgatctctgagcttttctttagcaattctcattctttgagaaagggctctattttgaaagcccttaccaaaattctgcatcccttagaggcaaggatttctcttctgggatttatccataaacaaagcgggttaagatgggagatgcagaaatgacaggagataagatacagaactagaatcaggaagctgggttctagccctaggtctggcagtaaccaaatatgtgactttaggcgggtggttgaccttcatgaggtctctgtttccctaggttgaacttcatctgcttttttttttttttttttttttttttttcagacagagtctcattctgtcacccaggctggagtgcactggctcaaactcgactcaccgaggcgaggtgatcctcctgcctcagcctcccagtacccgagtagctgagaccgcaggcacgtaccaccacacccagctaatattttgtgtttttgtggagacagggtttcaccatgttgcctgggcttatctcaaactcttgggctcaagccatctgcctgccttggtctctcaaaatgctgggattacaggtgtgagccactgtgccggactcatcttcagcttttaagctgaattgtggggtgctccagggatataaaggcaaggtcatctgaatccccattcttagaccaattctgtgtcttgcctgctgggttgaaaaaatatctaatacccacataggtgtcaggcactattttaagtccagaaaggcttcaaggaggcagtaaatagagtctggaagaagagtgaagaaatcgatactggaagctgaagaaagaacaagccatgatttgtagtggcagaaagtttagcaacatattcacctgcaataagttagaagatagcgagtacacccaacggccacttgaagtctggctttgctgcaggcaaacggcatgtgccactgcatggcatgtgcccagggtgggctgtagagtggctgcaggaaaactcctctgggctcagggtctgaagcaggtggtagtcccagctcaacacacacacacacacacaaatgactcttccgaggtcaggagcagcactctttctagaaaggagaaccttcagcctggagacttgcagcaagacttcagggcagaaccaagagtctcagaaggtttggaggcctgaatctgtccttgatcattgcacccaaggtaaagaagatttccatggtgtctccacctcccaagagcctaagaacctgtgtaatgacagagtgtttaaccaatgttggatgagccagctccacttttactggattctgctctttcccaagaagactttgaaagaatcaagtaccaggcatcagctacaatcacaaatgtagctatggattccacctgagggaaggggaatagttcaaatgccctctagagatatcatgcggttgacttaagaaggcaagtctccatggattatcaaaacagcaaactacatgtgaacttgaagttggaacaaggaggaaaaccatggatgaaagggagaaattccaaaacagctctgtccagtatgttccttctcagaaccgagagggattgagtatatttgcatttgagatgacttatattaaagagaagtctggaacgaaggaggcaactccatttatttatttattcatgcattccttcatccattcattcattcaagacagggtcttgctctgtcatgcaggctggagtgcagtggcatgatctcaccccactgcaaccttcatctcctgggctcaagtgtttctcctgcctcagcctctagagtagctgagactacaggcgtgtgccaccatgcccagctaacctcactcactcgtccctctcccttttagtagatggggtttctccatgttgcccaggctggtctcaaactcctggggcaaagcatttttcaagatgggtttattcttaaataagtggaaagattcaccatgaacagtttattatattctactttagaaaaaatatacaaagatgatggtttgacagattgatgataggaaacaggtgaccctttccagacacatgacatccacctgcagcaaaatccaaactaaggtgatccacaacgaatgtaataatgttggaaaccttttggtttaacctccaaacttatttctccaagaactaaaaccccatcaatgggattcacttagaacaaatttgaaacataatttaggcttggataatcataagggaaattgtacaaggagacagtcatctcagtgtgatagagacaaagaaatcattctgctatggcttatccagtgttgaaagtaattatccaaaactctgaatgtaatgattatgtgaaagccttaggtcaaaagtcaaacttcatcacatgttttagaattcacagtggagacaagcattatggaagtaatgaatctgagaaaagagattaatgagagcataactcttatgcaagaaagaaaactttaccagagcaagaggccctacaaatgcaggcaaagtggggaagcctatagccagaaatcacatctcattaagtgccataaaattcaaacatgggagaaaccttatgaatgtcatcatgtgggaaacttttgttttcaaaaataacacacgtcattgtacatcagaaaattcatactgcaataagtcctcacgggtgtaatcaacatggagaaatctttagctgtaattcatccctcattacacaccaccatggatttcacacagaaaagaaaccctatgaatgcattgaatatagagaatcctgctttggtaacatgcatctcactgcacattagggctaggatgggggtttattatttgcaactgagtcaggaccccagcaggaaacagaagggccttttaaattaagctaattcaaatagaatttattcacaaagatattatttacaaagtgtaggtgtaggtgaaaggagttagccaacttgggtccctggggaacctctaacccacccagcaagtgcttacacttgtgcagatgttttgtgcagataagggaacttgcacagggggctcgcctgaacatgctcacaacagactaagggtctgcaggtgcactgggggaatggggtgacatcaccaagaatctgcgccttatacaaatagggaacccagccccgtcagcattagatatatgcatatgcccttgtattcaactgtgagggggtaatcagcaacctgctttccagggcccctctcttaactgagagctttccttaatgaattgtactccactcactctttgatgaccacgtgcctaattctttccggtcgtgagactataacctggacttagctaaggagcaaaatatcctgcatcataggggaaccacaagagacatggcagtaactcaaggcactgagcccaaggagataaagaacaaacagttaaagctgaaaggagagagatgttagagaaggcaaatttcaaaagagctatggggacacaaggaggcagccagaggaattcattgtccaaccttactcactcatccctctccctcacatctccactcatgccccatgggccgagccctatcagaagccagagggcaacaggcttggaggggtcaggtcctccaggcattgtcttcacagctctgtcctctatcctgggctctgcacctagtataacaagtaaatttctttactttgttacaagtaaaattgtttacttccagggttttttttttaaccaggaattagggttactaagagttaaagttttaacgaatatataaagaaacaattctgtatataaaatggacaaaaagagtaggacatgtttagggcaagagaggttataagaaagacataaatatgtggtttttgttgaagccagagttgaagggagcctgtgatgtggtcaggcctccaggacagtgggcaggtgcagagtggggaagatgggtctggcagaaaaacagaagatgcccagtccagcgaccaggagccctctgagtagtgacctggccatcttgttcaccaatgactcctaaggcatgcttcaaagcctggcccagaacaggcactcaatgaaaactgttgaatgaagaaggcaactcacagcaagtagatctgcgggcaggctgccattcagcaggagaaaactcacaactcctgttttcttcaagggccttggggagcacaggaacaagatgctgttataacccacattagatggtcaccaaacaattacataacaacaaaaaaaaccataatgcagcaagagctgataactttaagcagaagagagaaagatgaaagtgaatctatgggcactgtagtggaagcttgcaagatatgttccattaaaaccctgcaattccgaccagtaggtgtttcctcaccttcagtaagcaagaacactcaagttctgagggctttgtaagttttctacgctcacatggtaaactgaaattgggatttgagctcagaactatctgcattttaaatctggtgttttcccatgttgcgggatgtgggataaactctgctcatgttgaaagactaaaacaaatacggctgagaataacttaatagttttaagaaaatgcctccactctgatgatgtgtcacaatagccactaacacattttcttttataagcactgacaaaagcagctattagttgccaaattcatggctccagaccccataagcaagttaatgattcacttactaacccccttgctgttccttaacatttgaaatgaaatgggcaaagtgctttcatgtactgtaaaagaaagtggcagctcactaagtgcaaagaaaggccatttttacaacacatttctatttataattattggcatttgtgctttaatggaaaatggaaaccctactgcttaacacgttgaatccctcttaagagaaagctaagaaaaaaattggctgggcgcagtggctcatgcttgtaatctcagcactttggagcctgaggtgggtggatcatcaggtcaagagtttgagaccagcctggccaacatggtgaaaccccatctctactaaaaatacaaaaattagctgggcgtggtggcacttgcctgtagtcccagctacttgggaggctgaggcaggagaatcgcttgaacccaggagacataggttgcagtgagccgagatcgtgccactgcaccctagcctggtgacagagcaagactccatctcaaaaaaaaaatcaaatttaccttgaaaaacaaactacatttttaaatagcctggccgagtttcccagtagaactacttttcctagaaaactcagaggtgactttgaactacaaagaaatcccttgtctttcttaagaactggcttttccatggaaagccccctgctatgggaagactttgctgactacagtagcatcagtgatcagttcctcctcctctgaatggctttagcatttattacaagcaactcttagttctttcattaacaaatgattttttgagcacctacccacaccaactgctgtggcaggtgcagggaatagagaacgcagaagatagagaagggctctaccctcatgaatcttaagccaccaaataactaaacagaatactaccaattgtgataagagttactaatggcagcagtggcccatctagagtgaccactgccaagacactggctacagtgaggaggcgcagctggacctcccactgagagcaggcaggagctccaccctccccaggtgccactgcagctcccctggtgtggctccaggcgtctctgtgctcttgggggaccagggaggcccccctgccccctgcagactcagaagtgcctgctcctactgcgtggcttctctccgctttcagtgtcctttccaatctcagaggcatggccagtgctgcacactccatgaagctggcaggaaccagggacaagcaggagccctgccccttctgagttggtggggcaggagctcccaggtgcagctgcagctgcccaagcccagctatagacccaagcatctctgtgctcttggggtcctgggaaggcttcctccccattgcaggctgggaagtgcctgcccccactgcctgtcctctccccactcccaggacctgctccaatcatggagcaaggttggggccaagcctgggcactgtcacagcctggccaggtgggcacatgcttggggcagtgctgccatgccatccccctgctacctgggccccctcttgactttgagcaccaataagcacaggagggaagctaggaggaggctaaggagctaccctctccagggcctcctctctgctgagagcagcaaatgttgggtgaccagctgcagagaggagttaccctctctgctgagagctgaacactctttgggatgacctgcctgcagagaggaaccacccactccagggcctcctctctgctaacagctgaacactcaatgggatgacctgactacagagaggagctacccactgcaggtctcccctgagctgttctaacactcaataaatctcctctttgtcttgctcaccctctgcttgtctgcatacttcattcttcctggatgcaggacaagaattcaggcaaaagcgccatcaggcacagaggtttctggccagaaaagcaacaccccaaaaatcctgtacgatttgtggggggctcgtctgggatctgcagaaggttgagtaaaagcagatctttctgtccttttttttttttttggagtctctaaactacacagcagtcaaaatgaaagaaaaataccaggcctctgttagccagttaaaagtgactagcgtgggtgctgcacaagacacagaatacaggcttgctggggaggacactgtcaatcccccatccccctcacgggctggaaacattggctttgttccaacccagtttttcttcacaagggtctggccgtagcatgggaccagaaagaggtcctgggtagggcaactgagggtatttgactgaggctacacctcagtgttatccaaaggcccctggactaactcctgtccccagccaccgattaggatgtcagcactaggagctccatcttacctatcattttttctttcttttgcagctatcatggttcctaattcttctttatatacaatattaaatgttaaggatattgttgaaaatgacagaaatattactgggtagaatgagcatttggcttagtcatcaggagcgtacatgagaacaatgtggtgtctgtcgtttcttagaagtaaggaggatataacaattgagagttttctttcccctgttgaaggagctcacatgcatagggcaagaggctttttttccccaggcaccttcccctcccctgcacttaacttgtccttttgggaggcacctagttgagccaggaccccaattcccaggactccctttctctcccttggtagaggaggacatggtcccacagcttatgatagggaagcaacagaggggctgccccaccagctgctggctacaatttggcaagagccacctgggactaattcaatgagtccatacatccttctgaggcaccttttttcccccaagcttcagtttgaggccctagaaaggaaaactagatctgagggctccagaggcagaagacagcagaagtcaaggtgcacagcacaggtgagcagtccagttaagaatctgtccctccctaaacccagccactttcctcccagagggagctggggagcttgaacatgactacgaacagatagtagtgccaacttacgagaccagagaggacctcaaagaaacccccttagagaactcaggatgcattctctttatggacagaagtttctttgtggagcaaagaatccataaggtggggtatgcagtagtcattctgaatgatgttattgagagtatgcctctctcctcgggcacaagtgctcaactagctgagctaattgcctcacgaggacacttgaattaagcaaggggaaaacggttaacatttatactgtttctaagtatgctttcccagtcctccatgactacgccactatctggaaagagggggacttcctcatagccagtgggtctcccattaaataccagcaggaaatcaacagactattatcttcagtctttcttccatgggaagtggcagtaatacatagtaaaggccatcagaaaggaagagatgaagtagccaagtgaaataagttggcagaccaaacagctaagtcagcagtgagagggcctcagatttctgatccactagaggcccctatgatctgggaaggcaccacaaaggaaataaaacctcagtattcttctgtggagatagaatgggctgcttctcagggatatacccttcagagctcaggaaggctgcaatcaggggacagcaagattcatctacaaggttccagccaatggaaagtccttataatcttccaccaagccttccacctaggtaaggataaaacctatcaaatggcccaaaggttgttctctggtaaaaatttgctaaaaacaatgatagactggattaagaaaatgtggcacatatacaccatggaatactatgcagccataaaaaaggatgagttcatgtcctttgtagggacatggatgaagctggaaaccatcattctcagcaaactattgcaaggacaaaaaaaccaaacaccgcatgttctcactcataggtgggaattgaacgatgagaacacatggacacaggaaggggaacatcatacaccggggcctgttgtggggtggggggagggaggagggatagcatttggagatatacctaatgttaaatgacgagttactgggtgcagcacaccagcatggcacatgtatacatatgtaactaacctgcacattgtgcacatgtaccctaaaacttgaagtacaataaaaaaaatttgctaaaaacaaacaggtcattaatgcttgtgagacttgccttaaaaataatcccctcaaccaatggcttctccaccctgcaacccaaagaataggaggctacccagcggaagagtggcagatggatttcacccatatgccaaagacaaagggcatccagtacctcctagtatgggtagataccttcactaacttggtagaagcatttccatgtcaaacagagaaagcctctgaggtgataaaagtacgcattaacaaaatgatgccttgctttggacttcctaagtatgtccacagtggtaatagcccctggttcaaggtggctgtcatgcaagggtcctcaaaggcactaggcataaaattctatcttcattgtgcttggagaccacaatccttggaaaaggtagagaagagaaatgatattatcaaaaggcacctaggaaactggctcaagagactcatctcccctgagttactcttctccccatagcccaactatctgttacgaacaccccttcaaagctgggtttaaatcctttcgaaatgatgtatgaatggcattttctcaccaatgatttcttgctagaccaagaaacctctgatttaattaaacatataacctctttggcccgtttccaaaaggaactgaaacaactatcagaggcccaaccccgtgacctggagccccctctattcaacccaggggactcaccactggtaaatgctctccctctcctttctccctctctacgcctggaatgagagggaccttacgctgtacttttttctactcctacagcagtaaaggtcactgaaatagattcttgtattccttatactcgagttaaggcctgggaaaccaatgaaattgcctctgttggtccaggagagcacctaaagtactggagtgaggaaatcggggacttcgagctaaaaaatcaccaagattagcaaaaagataagtgctaataattaaccctccagggatatcctatgcttactattctcaactttgttctgttcctcactgtaggcatctttgtcaaggacccttcccaagggattatctactcccctaaacagttacttctcttttaaaatttaactgtccccatagaagattcaatttctcccaccagtgtgaaacagcccatcgcatacttaacctccttgtaaaatgtgtttcttctcacctagaagccattaaatttcaagtggtcatgcaactggagcctcagatgatggctccttttttactgggaactcttagataagcctctgagagagaactgactgctgctttccccaaaacaatgccccctgtcagcatgaagcagttaagagcaaccatcatccctatcctaacagcagttagatgtacctctttagaaggggaaatgatggcagtagcggcccatctagagtggccactgccaagacaccaactgcagtggggaggcacggctgggcctccctctccatggagcaggcagaagccccatcctttctggttgttgctgcagctgccctggcatggctcaagacctgaatgtctctgtgctcttgggggcctggggagctcaaaagtgcctgctcctgctgcctggcttctccctgctatcagcagcctcttctttaccagagctgcacactccatggagccaatgggagctggggacaaacaggagccctactgcttccaagttggtggggcaggagctccccaggtgcagatgcagctgcctcagcctggctgcagacccaggcatctctgtattcttaggggcccaggaaggccccattgttccccactggttcacgcctgcctggcctctccctgctcccagcacccactctgatagtggagcaaagttggggccaagcctgggcactgttgcagcacagccaggtggacgcatgcttgtggcagcactgacacaccagacccctgccaccttggccccttccagaatttgggcatcaatgagcacaggagggaagctgaggaggggctgagggcagctcagcactgtcctgcaggtgccccttggcacaaagagcctaagcaccatgaacaacaggggaggcagacaggctcctgggcagaaggaaaggggtctccagtgaagacccaccttcaggctggagaaggcctggagcctgggggccaggctgccagtcctgcagactggagggggaactcatggtgctttttcctgcccatgatccaatcaccaaacacttcctgcctctgaagacgttgaaaccctggactcggccagagcagagcagacatcaggatgaccagctgcagagaggagctactcactccaggacctcctctctgctgagagctgcaaacaatgggatgaccagctgcagagaggagctaccctctctgctgagaggtgaacactcatcaggatgacctgccaacagagaggagctacccactgcaggtctcctctgagctgttctaacactcaataaagcttctcttagttttgcccaccctccacttgtgtgcgttcctcattcttcctggatgcgggacaagaatgaaggcaaaggcaccactggccacacaggtttccagccacaaaagcaataccccaaagatctcgtaacattgtgatggaaataaatcagttgatattttcaactttaaataatgagattcagaaactattatagagtttatacaagcacaagcttaaggatggccacctggaaaacacaggctccaaaagaatgggtcagcattgcaaagtgggaaagtaagatttttacttatatagacagtgaatggggctgcaaccctctctacacgagatcactatacacattacagtgatttgattggttacagcttgctacgttccaaggaagaatgctttaacattccatgaggaggggtgatgatctaaaggggtcttatccttggtgtcatctctgtggcctttcctaatcatttataggaaaaagcagaagttgtaactgcatgctatgtgactcagaccacatagccagccaccacatgcctctcaaggctcaaaatagtttaaagcttcaactgctttaagtctgaattatttaatttcacaacatcattgaaagtgactaggttgagggcagtggtatcctagtaaatgtttaaccactagctctccagggagaaataagcttggatttagagcatttgccaatttcttttgtgcaaatgctctcaccgtggctgatctcaagctactaacatgacaccattcaaagtggacttgggaagagatgtggagcagcaaaccattgtataagatttccaccatacagagaaagtagacatatataacatcaaaagcatgaacaaaactacaatgcagtaaaatgtgtttgctttctcaacacttgtataaagctgctgatatcctgtattgaaaggccacttcacaagaacataacatgtaataatgtttaaaaacaacttcaatgaaagaactttaagtcttgatgttataaatgtttctctcaagttgttttcatcaggaggacatgaaggctgaggtgggaggatcagctgaggccatgagttttgagaccagcctgggcaacatgaaaggccacatttctacaaaaaaaaaaaaaaaaaatcttttaaattagccgggcgtggtggcacatgcctgtagtcccagttacttgggagtctgaggtgggagaatcacctgagcccggggaggtcaaggctgcagtgagctgtgactgtgctactgcactccagcctgggagacagagtgagacctcatctcaaaaaaaaatttttttcaactcttctctaaggacaagtagcaatcactttatgtataagagtcttcaatatttttagtgtaactaacaacattgacaatggcataataaatacatcattttgaagagaagggaaaaaaatgcagtgacataattaagaactgatctcaaaaacaaaatcttggtctcagaaaccattccccactaaaaaccagagctctttggagaagtggctgatttcagggctggagcagggaaagtacaagtatacctgaaacatcttgttataacagaaaataagaaagtggttgaaacaataatggcatgtcaaaagaagtggctcccactgggtaaatctcaggcaacttgagtaccaaaatgattaaggacaatagtgaatttaaaaaaaccattgggaaagacaggaatccatgagtgtgtactgctgagaaatagaaagacaaataagtaaatacaagaaaaatgaaaaggagaggggagtaatatggtttggatgtgtgtccactctgaatctcatggtgaaatgtgatcaccactgctggagatgggacctatgggaagtactggatcatggagctagatccctcatgaatggcttagccattgcttggtgatgagtaagttcttgctcagttagttcacgtgagatgtagttgtttaaaagaatctgggatctcctccttctctctcttgctccctctctcaccatgtgatacactggctccccttcgccttccaccatgattgtatgctccctgaagccctcgccagaagcaaatgccagcaccatgcttcctgtacagactacggaaaaatgagccagttaaacttattttctttatacattgcccaccctcaggtatttctttatagcaatgcaaaaacaaactaacacagggaggttcttatttacagaaggatgttaactgccaactggtaaatgtgcaggaagtggcagatttgtagaaatcattgattaattcagacaaaaatcattaaagaatgccaactctaggggaaaattttgatgagaaacactatatatgagtgatcttatagtgtctgtatacaaattgcttctttaatacaagaaaaacagtctctgttcagtggagaagttacctaggtgataaaagttaacatctctagtgaggtgcaggtggacatagtgtatctacagatgggacaatctaagatggttacaacattactacatagtatcgcaaatagaaatggaaagcctgaatctaaccatgagaaaatttaaaataactatcaaaaaggtaacatccatatacagatataatatctataacatatatagatatatggatataacatccatatatagatatatctatatatctatctatagctacatctacagatatctatagctacatctacagatatctacagatatctatagctacatctacagatatctatagctacatctacagatatctacagatatctacagctacatctacagatatctatagatatctatagctatatctacagatatctatcgatagatatatctatcgatagatatatccacatagatatctagatatatatggatatatctatagatatctatctggatatatctatcgatagatatatagatatatatagataaagctatatagatatatatagataaacctatatagatacatagatatatagagagaaacctatatacatatatagatatatagagagaaacctatatagatatatagatatatagagagaaacctatatagatgtatagataaacctatatagatatatagataaacctatgtagatatatagatatatatagataaatctatatagatatataaaatagataaatctatatagatatatatacataaatctatatagatatatatacataaatctatatagatatatatacataaatctatatatatacataaatctatatatacataaatctatatagatatatatacataaatctatatagatatatatacataaatctatatagatatatatacataaatctatatagatatatatacataaatctatatagatatatacataaatctatatagatatatatacataaatctatatagatatatatacataaatctatatagatatatatacataaatctatatagatacatatagataaatctatacagatatatagatacatatagataaatctatacagatatatagatacatatagataaatctatacagatatatagatacatatagataaatctatacagatatatagatacatatagataaatctatacagatatatagatacatatagataaatctatacagatatatagatacatatagataaatctatacagatatatagatacatatagatacatctatacagatatatagatacatatagatacatctatacagatatatagatacatatagatacatctatacagatatattgatacatatagatacatctatatagatatatagatatatagatacatctatatagatatatagatatatagatacatctatatagatatatatagatacatctatatatagacatatagatatatatagatacatctatatatagatatatagatatatatagatacatctacacagagagatatatagaaacatctacacagggagatatatagatacatctacacagagagatatatagatacatctacatagagagatatatagatacatctacatagagagatatatagatacatctacatagagagatatatagatacatctacatagagagatatatagatacatctacatagagatatatatagatacatctacatagagatatatatagatacatctatatagagatatatctacctatacttcctgtgagttgtgtttctctggagaactaataggtagggtgactgtataatttactctccatactgggacacttttaatcattgctataatacattaattttaatctaatcttcttatcccttgcccccttccacttctgagtatatagatatatatagatatatttatatatacacatatatatatatagagagagagagagagagagatgttttaaggaattggctcacccaatcatggagtcttggcaaatctaaaatctgtggagtagtccaacaggctggagacccagggaagagccgcagttcaagtccaaaggccttcagtaggccagcctccctctccttctggggacctctgtctttttctatgaaggcattcaactggttgggtgaggttcacccacaatttggagggtaatctgctttactaaaagtctacttatttaaatgttaatctcacctgaagaatcatttcacagaaacatctagagtaatgtttgacctaatagctgggtaccatggcccagccaagttgacacaaaaaatttgccattacaccatacattgaaccaaagtggaaggggatgagatgaaattctacaggctctcccatattaaactcagcagcagctctcccatattaaactcagcagccagtgattaaagcccttagggtgtcataagcatgttattaaaaataactttctatatggaactataaacgatcttgaatagtcaaagcacccttgaccaaaaaaaaaaaaagttgaaggcagttggaagcactatactacctgacttcaaaatatactacaaagctatagtaaccaaaatagcatggtattggcataaaaacaggcacatggaccatcggagcagaagagagaacccagaaataaatccatgcatctacagccaactaatttttgacaaaggtgccaagaaaacacattgggaaaaggatagtctattcaataaatggtgccgggaaaattggatacccacatgcagaagaatgaaacctgacacttatctttcaccaaatacaagaatcaactcaaagtggattaaagacttaagtgtgaaactcaaaactataaaattaccagaagaaaacatagaggaaatgcttcatgacatgaattggacaagggttttctgcataagacctcaaaagcacaggcaatcaaagcaaaaatgaacaaatgggattacatcaaactaaaaagcttctgaacagcaaaggaaacaatcaacaaagagataatctacgggaaatatttgcaaaccatacatctgacattcttgtgatatagtcatggtatattcctgaatcggtggctcacatgatatattcttgtaacatactcatgacatgtaaaaaactcaactcaataggaaaaatacctaattttaaaatgggaaaaagactttaatagacattagaaataagacatataatgagccaacagttatctttaaaaaatgtccaacatctctaatcatcagggaaatgcaaatcaaaacaatgatgagatatcccctcactccagttagaatgactatcatcgaaaagacaaatgaaaagacgtgttggcaaggatggggagaaaagagaacacttacacactgttgatagaaatgtaaattagtacagccattatagaaaacagtatggagattcctcaaaaaactaaaaatagaactaccacatgatccagcaattttactactagatatacctccaaaggaaatgaaattagtatatcaaagagatatctccattcccatatttactgcagctctattcacaagagcgaagatatgaaatcaatctaagtgtctaacagcagatggatggataaagaatatgttgtatatgaacacaaacggagtacaatttgccataaaaataatgaaatcctgtcattttgacaacatggatgagcctgggaaacattatgttacatgaaatgagccacctagtgtggtggttcacacctataatcccagcactttgggaggctgaggtgggaggattgcttgagtccagaagtttgagaccagcctgggctacagtgagatgtcatctctacaaaaatatttaaaatattaaattaaaaaaaaagagcagatgtggtggtacgcacctgtagtcccagctactcaggaggctaaggcgggaaggattcatatatatatatatgaaatatatatgaaatatacatatgaaatatatatgaaatatacatatgaaatatatatatagaaatatatatatttcatattgtaccccataaatatgtgcaattattatatgtcagtgaaaattaaaattttttttaaaaaaacttcctttatactcagcagatgtagggttaatgtgttgaaggaaaagaaaagaagaaggaaggagaagcacaaaatggacagaatattgagtgtcagggtcaggttctcataaaccacattcctcggtatacatattgcaatataatttgccagtgttactttcctgaaggacagctgaacacagtgctctgtttttcagcagcagttgaggtaccttgaaccatgaagaacccttggtatcagaacatcatgacttttcaaacaaaatacagaaacagaagctaccaaacattcaccttttcagttcatctgaaaagctaccaagtgagattgtttttaatggcacatttataccaggtaattgtctggcattatttaaaaaatgggatgaatctgtttgttgacacagaaagggcaacaggattacatagttaccagggacacagactttgaagtcagataaacctgagttcagatcccagctctgttacttgtaacctgtgtgatcttgggcaagttattcaatgtccctaccctaagcccaaatatcttcatctgtaaaacatgataaaagtattactgcccatagggtcattttatgacactactttcttttgtttttaagtgcgcgtgtgtgtgtatatacgtatacatatatatacacaaacacacatatatacctgtatatatatgtacacacatacacaaggcaaaatgttggaaatatattttttaaggtttctgtgtacttttcatactgaccttgtattactttagtataataaaaacataactgcaattagctaaagagtatacattcataaagaaagtcctagaagaatgtatattaaagagttaacagttgtcacatctacaggttgggagtcgcgggcagacaagcggtaagaaaacttgcactttggctttatgtatttgggtaacatttgaatacttttgacaaatgtgtatatattattgcttttttatttcaaacaaatgaaggggaaatgtaaaagaaatgtaattagcatctctgtcgctgcagctttggtgactaagggcatttgcggcaaatgatagccttgaccatcctgccttccttaattgagttctctgaaagccttccacatcattcaggccttcttttttccctgaaatgtttagctttaacaaaattctgagtagaagcatgaccatgagtcacaattacaggaaggttttataaatattatgtaaaaattacctaaggcaacttggccaaaagttgcacaagtgggcatgattcacccaaatgatggagacggtatggtgaacagaaaaaactcccaacaggtcattttgtttaatattcccccgcattgcccacatccagaatctttgggtaaatcttcactttcaagcaatcctgaatcccagtggcacttcattttctgaccacacaagttcacagatgtcaccataaactgaacacctggtgttcagttcccaccaccaggcacagggaccctccctgcactctgccacatgggagcctccgtgttgaagaacggtttttccctctgcattcaagcacaattttacatgaatgatagaaaagtccagtggatgcctgtctgtaagcaccagcaaaaagaatcatatttatatctatgcccatccatctaacccttctcttcagcattttcaataaaatctcagttctatcagaacttcacctgcagcttgcatccttccttaaacctttaaccagattcagccatttttctccctgtcatcatttattttcactgcctcccagaaacccacatttagcctaagcaaaatgtgcaaaaaagaactaaaggcaatgcacatctaccctaaatccaagccttccttgagcattctgtactttctactgtgagacattaaacccgttttctccacttccttgagcctgttatttctgcactgttagacaattttctgctttatgtctctcttgatagactttcagatttgggtcttatatctagcactgtcttgcccatggcagatgttcaatgtcatatatctttgtggaatgaatgactgaatggacaaatgaatgagtgaataattctgccttttgctgccaaagacccatgatccttttaactcttactatcacatgtatcagttttttgttgttgttgttgctgtttttctgtgaatgttttgaagcagtcaaatttgagtttgactcttagccttatggcgatgagccctgtgacccagggcctgtcattcctgtttttgtatagtacaaaggagaaaaagaaacctaattctcaggaatataaggattacctgagataatgcttgtagcatatcatgcttagtaatgtttctttctgtgtcttccttccctgtaactagacagctgcttgtattactgggactttttggctgcagttggccactacaaccaactagtgtgtagttggttcacattaactcacttaaatcctcataacaactttatgaagattatatgttcataaagaacatatttcttagcagaggatttttgagtttcagatttatcaagcatttatgtatggtatgctaggcattttcacagctttatctcatcatgttgttgaaatgagtgtacattttttgttattaatataattaccttgtttctgtttaacagtattttagatgtgactaaaatagccatattctcatatccagtcattcaggtttacacatataaaatacaggacactaaaactactgactttaaatctgaatttattgagaagtaataaattgtaggaagtattcttcacattactaaaggaattattgcaggttggttagttttagaaagagttgaatctcctttacttatccattattttttggatttattaaatccaacacattttatacttaaaatgtgattgatttacaacatttcagtttaccacaacttttcaggagtgtatatgtttgttgtgtaagagcttgtattggcagagaagtgcaaacttccccaacctgactgcattcaaattgtctgtgagatgcttaactgaaaagatttgattgcttaactgaaaaggatagatctggctttttgttcaatttgcaaataattcagacatcatcatattaacagcaacttggtttctctccatctcaataacttggtttcttcttcacgttatgcctggcagcaagatggtagcaacctttagccaacttgcttccaggttcaaatatgaatcctggtttctttcccaggattcccagcctgagattccttgcatttcattggctctggttgggtcacatgcctatccctgaaccaatcagtaagaccaagatattgtgatgcagtgattgacctaactctaggtcactccacctttgacctgtgggtgtggccctgccactgaagcgcacagtcagagagtagaaagattactgccaaaagaatattgaaaagtgaagaaatagatgctgagaagccaatgttcaccacaggcacttccaaaagccttcactcagcaacgtgttttgcacagctgcttaagaggagcttaacagctttgaagccaatgcagaaaaacaccagtggagactgacctcttctagcataattctgacagggccagctacataattttcagggtctagtgggaaatgaaaatgtgaggtgccttgtccaaaaagtaggtggtaaatgctgttaaatgtaccaggacagaaagctgtttccttttctccatggcctctgaatttgtcctggtgtcttttatttgccaattaatattgttctaagaaaaaaataaattattagcatgaattgtactgtttatgttgtgcaatgtcagtttgaatgcaaatataagagcatttaactcatgtgcagtgtcactgagattacccaatttgtattttgtagttcatacgtgcatatgtatttcattcttgccagaacattagaaacgctgaaccaataactttatttcacttcttgatacttgcacatcctaccaacactgtctacatttggcttaccgatgaggaaggaaaaagtgaaaggaaaaagggctctgggttgccctatctttcctatccttctgtttcatcttcagcataagtggttggctagtatagagaagtaaaaaaggatgtcatttttgtttcttagaacactgccttcaaggcaagttctggttcaaataaaaaaaaaattaacctctcaaggctgtcagcgtcccagctccttcagccaaaaatgcaaggtgcttatcttgtaccctttgagtctcattgaactctgtgaggggtgggcccactggaatcctgagctcatggggcatcgtgaaagctatatgcaaacgagcagtaaggaactgcaatgtatactcacactgcaggtgtctcctctgcgcacacacattgtgccatcagacttcacttacaaaacataagttcaatgacaaacctgttaagagtttcaggatggccatagcagggctttaaaccaagagcaactgcccctttgaacatagacccctgagcaactgtgcaggtcagatgcccatgaagctggccccgacttagggagaaaaagcactccttgtatgagcacagacgttctctgtattattccagatatttcaaccccatcatcaccacccaaaatagacagaaaaataaaagctgatgctaaactcaacaatcttgcctatctggttaattacatgttgttctgctccctaatgctccttttatatccaacatcattgagttggtacagacagaactgtgtggtccatttgtttccttgtgggtaaatgtccagaaacaaatcaagccactttgtgtacctttgctaaagttagctaaagaatactgggcatctgtctttgaccgatggtccacaaagggatgtctcagattgaatgcatcaggaacaaatcagcccttatttaggaagtgccacatagcttcggctcagtgctgacaactgttctaaacattttacaaattatcttactaatccccaggacaaccccaaaaggtaagaaattatgattatctcccattgtatcgatgggcaaactgaggtacaaagattaaacaacatctggcaacataactagtaggcagctgtttaaaaggcagttacagtggccaaaaagtccagattataagagaatcagtccagtttttctcaccaggcataacacaacccacctgaagaaggtacaccgtcactcagctcatctgaagccaattgaggattcctcgagcccactggttctcagcccttactatacattgtaatcaccgggcagcttttagatagctggatgcctggcctcaccctacaccaatgaatcagaacctctaggggtgggacgcagtcatcagtcatctggaaagctctctaggtgattgcaatgagttgccaaggttaagaaccacgcaagtctggcctgttctgcctagtacagtgatgactgactcccagaaaaagcagatcctccatttgggaatgacatattttaatataacctgcccacctcttcttttttttattgttttgcttgtgtgtttaagaaaatacttattgcagcagaaacagtactgatcttaacattggcaggacctggagcaagagcacaaattgaggtccacgtacataattctcagtacttcaacattacaaagtagggtaagaaatcgttaaataaaattacttctattctccgaccttgacaaacacacccacctaacaacaaaatggaaaacaaaaacaaaaacacatgcgtgaagcaacagttcatacaaataactatggatagcacaaattcaacatcaattgtatattctgccaaagacaatgatttcctcttgggcaggagtgggaatgggaagatgggattgcaaagaatttctccctccctcaccaggtcacaccatctggcctcttccactttcttgtgaaactcacagaaaccatgttcttttcctcattttgagaggggagatctttcaccacccaccaagattcatctcttcccccaccttcacccccacgatctacataccagtgaagagccccaacatcaggccatgagacttccctcacctccttccacccaagcctagaacttctgctcatgaggtgccacagccccccacctacactgaccacacccccaaccttaccccctgttcttccttcccctgactcagtcctgcaccctgaagggccttagccactccttaggctgatgggggcacccgtggatgaggcacgctggaagaatggatcagggaagagacacgtgcagccctgggagaagacatagggatttagcaggagggaattccttccagggtcctggtactggaaggcagcactaaagagagggcatgggctaaggcgggcatgtccccttgactccagactcctcaccccaatgtagctccaaccctggaagtgggaggacattgctgggcacagggaccactcttgccctgaagactatgctagcctgaaaccttgtctttcattgtctctgtgggatcttgcaaagagcctaaagttgcaaatatcatttttatccccactttgcagtgagaaacagaagcctattaaagtgaataactttccaagattctgcacccattagatgaggccaggatttgaattgagctctcattctaaagcccatgtctctccccatccctgctgtccaaattggacctctcatacgtgggtctccacaaaacccagttgcctggcaaaccttctcccactccccatacccactatggtctactcagcctgaactcacgttgcctgtaccagcaagcttcaaagtggagtatgcataccatgaagactctggagtcagccttgaggatagttttgctgttgttgttttgttttggggtctttgagacacggtctctatattagtccattctcacactgctataaagaacttcctagagactgggtaatttataaaggaaggaggtttaattgactcacaattccacctggctggggaggcctcaggaaacttccaatcatggtggaagtggaagcaggcatcctacatggtgccaggtgacagagacagtgtacatgtgaaggaggaactgtcaaacacttataaaaccatcagatcttgtgagaactcactatcaagagaacagcatgggcgaatccctccacacatggggattacaatttgaaatgagatttgagtggggacacagagccaaaccatatcagtctcactccgtcacccaggctggagggcagtggcacaatcatggctcacagtagtctcaacctccccaggttcaggtgatcctcccacctcagcctcctggaactacagatacagctagctgggactacaggcacatgccaccacacccagcaaaggaatagttttctaattaccagtttccaggttctcaaatctcaaacgtgctcactctaaaactgacctgagaacactccttctgcccaggagcgctcaagaatcctgcatcaacttttcctctctcctctttcatatttatcctgttccttctacacacacaggcacgtacacacgcacacatgcacacacacagcctacttctccctacccataattttactatggtgtaacatccccaggtccaaaaagtccaaggcatcacacaaaaggataattctcaatactggagttaagtgttaagaaaatgaataaccctacagtctaggggataaatccttccacaattccattagtttccaattctttgctttcaaaaatattacagcaagacctaattgagctgtcagctcatagatcattaagaataaattttatggtaaatcgccacgcgatttttggcatatagctcaggaggagcttaaatcattgagtggcattgctgtaacaaaattattttcaagtctatcaatttattcatgtgtgaacaagatttctcagcatttacatctataaaaatgcatagtaagaacagaattaatgctgatccctgtatcattagaacaataagtaatttcctccttttaaacagccttttttaagaagctctatccatcttattaagcaatgtagtctaataaaatgttacatttatgcttaataattatttctcagccaggcgtggtggctcactcctgtaatcccagcactttgggaggccgaggcgggtggatcacttgaggccaggagttcgagaccagcctggccaacatggtgaaacccggtctctactaaaaatacaaaaattagctcggtgtggtggtgcacgcctgtaattccagctacttgggaggctgaggcagagaatcgcttgaacctgggagtcagaagctgcagtgagccgagatcgcaccgctgcactccagcctgggtgacagagcaagacaccatctcaaaaaaaaaaaaaattctcatattgttaatgaatttgtgttatgtggctcaattatattaataacaaatgaatttcaaatccaacctagaagaatttctttaggcactaaaaatctgacagtgctagaaaaaatatataccatctccaatgtgtgtgtgtgtgtgtgtgtgtgtgtgtgtgtatgtatatgtttgcttgtagagaatcataacagaatgatcaataaaagtctttgaagcagaaatataaatttcattagagtaagactctgtatggaaattttttaaatagtaacttcaaagaaaaaagagaccatgtaaaattttaaataagtttttatacatttttaaatgaataatgatgggtttgaactcattggatctatttaaacatacaacttttttattttaaaatgtcaatatttataatatgccagaagtaatattttttgcaaggatttgaacttacaaatgaaagttttgaatgtcaacctcaaaacgggtaaacggggggccaggtttggtggctcatgcctataatcccagtacttcagaggctgaggcgggaaaatcactcgaactcagaagttcaagaccaacctggataatatggtgaaacctcatctttacaaaaaatataaaaactagctgggtgtggtggcacacacctacattcccagatgctcgagaggctgaggtgggaggatgacctgagcctgggaggcagaggtagcagtgagccaagatagcaccactgtactccagcctgggtgacagagcccagaccttgtctcaaaattaaaaaaaaaaaaaaggtagagggaattcatgtgttatgaactaaatgtttgtgttccccaaaatccatatgttgaaatcctaatccccaatgtgatggtattaggaggtaagtctttggggagacaattaggttgtgagagtgaagcccccatgaatgagattagtatccttataaaagagactccagagagctctctagccctccttccaatgagaagactggggtctgcaacctggaagagggtcctcatcagaacctgaccatgctgactccctgatctcagactcccagactccagaacagggagaagtaaatttctgttgtttctaagccacccagtctaggtattttgttatagccccctgactaagcatagcttttctaaataagcttggggtgatttgcaagtaaaaaactgtgccattcacttagtcaccagtcccctccttgggacatgctctggattcaggaattatttggctgacgtatttgttgaatttccttccagcagcattgtctcttcaactagacttgaagcaaagagtcatatgctttgccgtgtccgctttctccaaaatatggaatcaaattgagccctgactctaatgcctcttgatccaccctcttggaacccatatatgatctgagttgaaatctcacatctgctggttattacatgtgcaccatgagcacttgctaagcttcttggggtcacagttttctgcttctgtaaaacagagacaaggccacgcacctactgtatctaagttacagaatttttacaaggctcaagtaggatcatttttccttttagttttaactctgatttttcaagtattaacttgcaacctattcgccttgttctgaggtcacagagcctcaaaaaaaagtaataaaaatcccttcctggaaaaaaaaccaatgaaccctaaaacaagtgaacctattccccttttcttgcacaataagccaaatatggcctaaaattccttcacaaaacccactgatactgtttggctgtgtccccacccaaatctcatcttgaattgtagcttccataattcccatatgtcatgggagggacccagtgggagatagttgaatcatgggggagggtctttcctgtgccgttcacatgatagtgaataagttttacaagatctgatggttttataaaggccagttcccctgcacaaattctctcttgtttgctgccatgtaagatgtcccttgctcttccgccatgattgtgagactttcccagccatatggaactgagccaattaattaccagtttataaattacccagtcttgggtatgtctttatcagcagcatgagaacagactaatacatccaccctctctaagctactacccattaatctgtaagcctactttccctctgatgtgtttaattattgattattgagtatgaagtgttttaaccattaagcttttgatgataccaccctccagggggggcagagcttcacacacagggtccgctaccagaagggagggaagatgacacattttccctgcatcctggggaaatgcgtaggctcctgaactggaaacaaaactgaatccatcaaggcctcagaccaaaatgcggggtggaggcacgaggatcggccaggaagagatcacacttatttcccagaacccaagaggtgtatcacagatctgccgtcactcatgtgggcaagcacaactgctctcaggtagcagcaataacctacctgtgtcagcgcaggacattcagaatgcaggcactgccacctgctttgatttatctcatcccaagcaaggcaaacaacccaaacagaaactccagacattccctctgaaattctatatatgggtttgctgtcaagtcaaagtttgggactaactgtgctcgcatcgttttgggatgaatggacactaacatgaacaaaaggtgaggatggtccaatcttagaacagaaatgggaggatggatgaaaaatcttttgaacataaaatcaaaatttagcaaagagcctctgaggtctcccctaggcccttataagctctgcatctaccacctcctagctaagtgactttggacacattattttagcccctccccaagcttgtttcctcatcagtaaaatgagataactatagtgtgcacctcaagaggctgtggaaggcttacatgagataaatccaggtaaagtgcacagcaattcctgaaggataaatagaaagtacttaacacacatcagcttggggacggagatagtgacatttattcatccacctaatgttccactactgccaacctcactccaataacaatgaactgcattgatctccaaaacacggcacaaactgtcatgctcctacgtaatttcttatgtggctcactctgctcagaatcccttgagctggctaagtcctactgggctttcaagactcaggtcctgtgtcacttcctccaggaagacagtggtacatactcttcttccttctcatcgcctcatagcacctggcacataacttcattacattcatgtggatcctttagattccaagaggcagaaacactactcaaaatgacttaaattgaagagaaagtccaaagggtagacatgacttcaggcacagctggaaataagaacacagatgatttcagcaggagcctcgggctggtgtcactctcaggcacctctcccctgccaaagcaagggtactgccagcagtttcaggcttccatctttccagcttacccaccccagaggatgatgcctgtcttttgtgatggtcctagtagtaggtccaatactgacactcattggcttaaatcgtgttctcatcctggaacaattactgcaccaggaggcaaaatgttttgactggccacacctaagtcatatgccaaccctttgatctaaactggagggccagccacatccaagctacacgatctgcaagttggagtatatggggccccaaaggaaagtagcagcttataacctgaaaaggaggcatagatggcaggaaatcaaaaaagcaaaagctcaaacaccagatgccaaaaacccatcatcctactaaccacaacctactcaccattggtgtgcacacccctccccgccgttgaaaagtgtttccctaggttggaagccatgtcttggtcatgcttccccagggcctaggagagggcctggcataacagaggtatgcagtaaacatttgtggaataaacaagatggcttcggttcaacagtctttggattgtaccatagataagaaaatagaaaatagaactggaactcaaatatcaacctggaaaatgtcaagtatcaaaattctcaaagggcagaaatcagtcttcctggaaccttcttggaaaaaaaaaaaaactggccagtgagtcctaatcccaaattagataccatccacaaaccaacagaccctatccccaatccactacggtccctttccagggcacgcacccctctgaacaagtgcatcccagctgagctcatcaggcatgtgccaggaggagattcctttattccaggaagtgttttcctacctctgaagaccccaattaaccccagtgtgaattcttgctagtgcctctaattcttggtggaaaagttttagggtgctgcgtcttgtaccatggcaggttttcatcaactgcaagacaaactgctctcaatagctatttaataacagtcacctgcttgctttttaatgtattggggtaatccactttaccttccaaagccagaaaggtataaccagtttggagaaacagaggagaagagtattagtgcctaaatagtatccctggtgattgccaggaaaacgaaagaaatatacatgtatgtttagaataaattttttgtataattgcaccagaagaaccatgtggacttggccaaaatatggcccagagcttataattaagtactgagaaatgtggtggatttgtacagcttccttttggaaatgctatttaaattagcttaagtcacaaaggaacatgaaggctcttatatctaggaagattgctggaaagtcatggacttatgataagactgtttctcccaacattgtcaatcttctctttgcctcatcctcttctcgtgcagaaaggctctttcggaggcaggactacagcaccggtttaggcgctcccacaagaaaagaactcctttcaaccatcccaaaagtctattccaggaaacactctgattggacacatttaggtcaagtgctcttggaccaattactgttatcagaagcatgacatcctacgattggccaagcctctgtagtcaggagagagcagggtgactggtggccccacagaagtacacagaatgattgggggaggcacaaaggagaggcaaaggatgtcttgacagaagaggaaggtagaatgctgggaacacacacacacttgcacaaaacagatgacaaacccctcagaaaccaccagtataacagtaacttttccagattccaaagtctataactccaggtgaaaaagaaattcggttgacaactcagcaataagggtgcaaacattattgttgctactacccagttatggaattattaatatatgccaggcactgacctaagtgctttgcacacattatctcacgcagcatgccatgaagtacttattattatcctcaggacacagagggggaagctgaggcttagaaaaaggaagtggctccttcaagcttacacagccagtaagtgtgggagcctggatgcaaacacaaggttcttactacaatgctatacctgctataccatagagtgaaaaaaacaaacaagtagaaggctgcaggcacccaatgccctaatacacacgttccctccaaaaggatcaagggcaaaagacaacacaatacagaactgataacacagattttgaagtcagacggacccccaacttactagtatgacttcggacaaattacttatcctccctggtcttcagttgcctcatccataaaatgggaaagtaatgcctatcccataacagtgctaaaaatagagaccacacacatgtatctcaaaaatacaatgtgtcccttcttcttccctactcttccttgaacaagaggataaataaaatatccaaaatggtcctgatcacttgaataggcaaataagcccctgactactgtgcaagctcatctacagataaaaagccttaaacatgcaagtcaaaaataatggtaacactttttggtggttggcaacttttcttaaatatgagtgtctgcttataactagggcatagggaaatgggaatactggttattgttcactgggcacctactatataccagacactgtgatgcatgttttacctttgctatctcatttcattctcacagcagacttcagagcttcaagcttaacgcctgctctaaatccctctgtggctgatgggactatcaactggtcaagcatttacgtgcacacactttgctcctgcaaccctctatctagaagttaatcttagagaaacaatcagacatcccaacaaagatttccgcgcaagaaagctcatcatatctgtgtatatcatttaaaaattcaaaaacacccagacatccaactatagtaaaaattaaattagttgtgatccgtctgcaggatgagtgttatacagcccttaaaatcaagttttccactacctgactgatcactatcattgctgctacaagtccagtattttgcctctgccagccacaaacagacctaagcagctgtgccctgaacagaagatcccttataaagggcagcccttaggcagccatattttagatcacatgacctccatggccacagttgattggacctttggcaaacactgtccacaagagcagccaatccagaagctgcctagcaatggacaccacagtctggcatgaaaaaatgaagtggaccaaccaaagaataccttcaagaatgtgaactaggaaataggggaaaatactacaattcactgtgggagcatatctgggaatgcaataatgtagactggtgtagaaatggtacaccagggtagcctggatgggtcatccctaatttaaagttatattggcagggaaatggattgggtacaaattatataaatggagtgtagtgaatgcacaaattggcaacctgctgatttcttcaggccagtagatgtgatttatctggtcacacaatgttttttatataatttgcattagttaacaacatttaaaattaatttatgtaaaaactcaaatttctgccgggcgcagtggctcacgcctgtaatcccaacactttgaagccaaggcgggcagatcacctgaggtcgggagttcgagaccaaccagaccaacgtggagaaaccccgtctctactaaaaatacaaaattagccgggcatggtggcgcatgcctgtaatcccagctactcgggaggctgaggcaggagaagcgcttgaacctgggaggcagaggctgcagtgagccgagatcgtgtcattgcactccagcctgggcaacaagagcaaaactccgtctcaaaaaaaaaaaaaaaaaaaaaaaaaaaaaccatcaaatttctggtggtttcccccaaagatcaggaacaggccaaactaaactatatgggagaaaaagacaatggtgattgtccctggtagggtaggggtggggggacactagaaaggcaaatgaaggaaatttctagggtaattataatgttctacatcttgacagctatttgggttacatagatacatgtatttgtcagaattcattaaatggtatatttaaaatatatacacttcacctatgtatattttaactccaaaaagggaggggagaactgtaaatcaatattaagctctagttaatgacatgcatgctgaagtgtgcaggtgcaaagtttactgatatctgcaacatacttggaaatgcatccaaaaataaaatgaaatggtaggtaaatgcaaggacagatgaatacttatgtggcaaatcaaatagtaaaatattaattatagcatctcaatttgaaaattttttataacaaaatgaaaaagaggcaaaattctagcggctgccccctttagagggggcaggtgttctccagatcaccacaatccccacccactctttaatgcctgtatcagcctgtattccagtgggcaatttctgaaacagagagaaaacaaggcaactagagaggtgataggagcaggtaccctgatactagagtagcgacccgtaccctcctgttcctgaggtccccgtctccaagcatctctatctgccttctagttccttcccttccagaagtccgttggttagtgtcacagcctgtgctcctctggaatcagagcctgagatgaaagctgatacatgagtagtttatttagaagtgagattatcagggagtaaaaggagggacagaggaaacaaacagtgacagagaaagagtcagtacaaaaatgtgtaactgagttgtccactgctgaggtgaccagttgctccactcatggccctttctagaagtcttacagaatgcacctgagaactacctacctaagggacaaaagggaagaatgtatcccaagagatatctgttataatcatcatggaatattccatccaatcattggaagattccttcccaatatccactcctctcattgctttcctgctaacaaattctcccctcccccgactttttttttccagatagcagcagagatatcttgatcccagctccagaggttgaatcatgattggttaaatgtgccataataattttatatcctttgcccaccgatttgcctaaagatgaccatggaacccaattctagtgaaagaaatgtaagcaaacatttcatttctagggcaacttccagaaaaccttttgattttctgacaaagaaagactaagttggaagtacccaaagcccatttactctctttcttctttctacctggtacacggaatttatgcttggaggtatagcagccacattgcaattaggaggtgacaaatgttataacaaaacaaagattctggaaattgtggagcagaaagggagagcaatcccaggtctctgacagcactgggtctggacttctacctctggacttcatatgggagaaaataatacccactagttcaaccctctgtagtctgccttctctttgccgctaaatgcattcctaacatatactcttggaatttcccaggtgttcaagaacttactatcaacattttcctatctaccattccttgaagcacttgagcaaccatggccttgtatccagaaaaaaagataattaaagatttcccatctcaataaaggatctcaactttgttttgagacatggtctcgctctgttgcccaaggagtgcagtggtatggtcacagcttactgcagcctcaaccccatggactccagtgatcctccaacttcagcctcctgagttgttgggatcacagacatgcaccaccatgcctgactttttttttttttttgtatttttatagagacaaggcttcacgatgttgcccaggctggtcttgaactcctgggcttaagggatttgcccacctcagcttcccaaagtgctagaattacaggtgtgagccaccacgccctgcctctcaaatgtttttaaactcttgcctcctcaaagagtcattgcacccagggttagaccatatgtgacctggaagaagacttgatttagctaaagtagctgtaataatacagaagagaaagaaacaaaagcaagcacctccgcagggctcaaagcaccattcacgaaagaaagtcacctattcctgcttctcctggcagtcgattgaatttggaaacctcccatttggaaaactagagaaaggcacatgaaagtagagaagagcttatggcaacaaaacaccgtaaaaatgcagaaaacaggaaaagcttcactgagtgggacagaaagaggattatcttgagaaaggccaaagaagaagtgatactcgaacagcagcaagtgggaagaactgaataggggctttaggagacgtgggttcttgtcagaattcttctgcttatctttgggaccatgatttcatctctcgaatcttcactgagtatctgctgtgtgtcagctctgctcagcacttggaagacaagaagccaggttccattagctgggtgtagtggtgcatacctgtagtcccaactacgttggagtctgagatgggaggactacttgagcccaggagttgaaggctgctctgagctatgaccacaccactgccctccagcctgggccacagaatgagaccacgtctctataatatattctaaaataaaaaacaaaccaggttcctacgctcagagagctcatttttgcttcttgatttctcttatttttcctagagatctttgattctcaaatgtcctacaagggggaatattctgcaccaacttccccaaggtgtgccctgtgaaacatgctattttctccagaaatgccacagggaaaaagaaagattctgtgaacagatccgttggagacagatgtcagtttaagtcttcctctagacctgtcctgtctagtacagacaagaggctgtttaaatttcagttaaaattaaaaattcagttccttggtctcaatagccacacttcagtgctcaacagctattcatgggtagtggctaccttattggacagtgcagagaacacttccacaatcacagaaagaacttctggatgccactgctattgaaaagtcaggctgactctgggcatattgcctatgagttcaccctgttctgcaaggttaaaatatatttaaaagataaaaaaaaaactaaaatggattaaaaacatgtataaggcacactgcccccattagaggctctgaaaaaattaatctgcagtaaaataacatgctaaatttttcaactgtctttgacatttattctttcctaccaccctttaacattacacagtatgacacttcacacaagcagatttttgcaggacatgttttacagaaggaaaactgaggccaggtatggtggttcatacctgtaatcccagcactttgggaggctgaggcaggtggatcacctgaggtcaggagttcaagaccagcctggacaacacggtgaaacctcatctctactaaaaatacaaaaaattagctggacgtggtggcatgcacctgtaatcccagctcctcaggaggctgaggtacaagaatcgctttgaggtggaggttgcagtgagcggagatcacgccactgcactccagcctgggtgacagagcaagactctgtgccaaaaaaaaaaggaaaactgatcaactgctcctcagtgcctgaccacctcttttccaagaagctctttttcgtgtttcgataacttgctatttgctcattttttctggctttcaactctgccatttgatgagtgcaatcaaatccaaagaaaaacaacttaagagaaaatgcgcaaagacaatgttgacaagagctgctatatttggagagaaaacgaggaacaattaatctacctagaacaaggaaagaaatcatgaaatcaattctcatacattcattggatagaatactatccttcccctacaagtaatagttctaatgtatatatgaaaagttgtaaatgcttatgacctaagtgaaaaatgaggacaccatgttgcacatgtgttatgataccgaccgtgtaaaaacaaactatatttgggggagaaaagccaaaatgtgggtgtgtttgcgtttaggtcttagaatttgggtattttgtttccttctttcctttatttctcaaatgtcttttcaaagcacctagcacttccaggaaaacaatgtaaaaaattaaagaaaattaaaaataaaacactgatagaatgacagccaagacgcatgtgggggctggagggttgctgctgattcactttggtccatggattttctgacgctgtttttattctattgaagcaatttgggcagtgtcagctctccacccctgctgtaaaaatgcaaatgtggtggcctctccctactcccactgctctgagcaattctccatcacccatggcacagagaagtcgctagggacccctgtctccaggcttccctgatagctgccttgcctgcaccatttcttcccctgtgaaagccactaccagccccatggtcccaccctcccagcaccgggccccaaaccctaactgcctctcaaaactcacctccaattcctcttcatttacatctttcccatctactcagctagatgaagtatgtgcccaaacgcccagccctaattctggtagagagtgaatagttcagtttcccttcgctttctccctcttcttttaaaaaattaaacacttgattaaacaaacagaaaatcatttctttgcaaatgccagcctgcagaagtgtcttcggcagatagtttttccagccagttcttctctaatttttccttgaaacacccaccgttcatttccgctacccctgcgctttcccctaacgcccacaacttggtaataattgggaggccagcgccagactgagtggattcaacagtcattaagcaaaatgcaaaagttaaaccagagcctcgctggatcgcacagctgttcctacacctgaaggggagccacttttattaaattatgcatccggtgtgccttttatttcctcaatgagaacgtggttcataagtggttatggggattaccttaaccaattaatttcaacaatttatagccttgaggcaatttcactgcagtatgtagtgggtggattgagcatttgagcttatgaaagaataatgatttgttttttgaactctggacattccatgggtcagggaacatgtcgtttggtatgctgtacctgcccagctctttggaggcgttctctcactcaagctgggttaccccctcaggaaacagagtcacaatgtccctctttgcagggttctaattgtgtctactatccacaagagcctcatatgttcaggaataaaaataatcaatagcttcctggttagactgaccaggataatgggaaatgggcttgaggagggagagcagatgccaggagcttggcaggcaggtttctggaaaggttttgctttcaaaatcatatataagtagctgggccaggcaacctgacctgttgagaaaaagtcctccaaggccaacagttaagagtctgacaagcatttcttttggtcctactatgcactgagggcagcacaggatgtaagaatgaatgagacctggagcctgcctgccctcaaagggcttacagtctcccaggaacaggtattggcacaaaataggctcccatttgtatttgagtacagaaatcctacaattcaatgtggtaatacagtaaagaaactaaaaagatttcagtggtggtctggcttccctatctaccagccctgtgaccctgggaaatattcttagactttctgctcctcagtttcctcacctttaaaattaggacaatgataatgtccacttcgtggagttgttatgaggagcaaatatgttgagatttaaaaagcactggaacggtatctggcttaggtttaattttttctttctgcttaatgacttgaaggtagattgagcctggtactggccttccaattattaccaagtcatgggagttggacggtacaaggatgaactgtgggtggtccaggagaaaactgcagaggaactggctgaaaaaaaaaaaatcaaagatacatgttcagcctgacatttgcaaagaaattatgttctattcacttaatatttgaggcataatttagaaataaaaagtcatcgtataattgataatcaaatttaaaagtaaagtacaaaaatcaaatttaaaagtaaagtacaaaatcaaatgccaccatgtcctcagtacccaagggagggatcttcattattaacatagctcctgcttctagaaattctcaggacatgataaatatcaaataatatgatgaaaaccaaaatatagacaaggcatttaggagaagcaactattaaaaaaaaaaaaagtcctctgttgtatcttgtatatcactcaggatccaggcattaaataaatggcatgctcaagagagacaattaaagagaatttaacaaaggatcaacttacaaaggcgtgggcataattaaggaaaatcaacaaggagtggggaaatccccaggagctggaaatagcaggaagcgatccccagtctggacttgaaggggcatgtggttgtggggcccaggacctggagagacccaaagctggaggaaagcgccacctgacaggtgctgttacttaaggggaggagctcagtctgccgtcatatgatattgtggctcgagcttcaatctcttgatggctcccattggacaaacccagctggaaaccaggggatgaagggccatgattgatgcagcacacacaggttgtcctgccatgaccaagagcattatgggattaagaggcacacagagaaaatgtctcaactgtaaaattagcataatattagtacccttgtcagagaactattctgatcattagataaagagatacataaagcacagtctctggcacatattagtgctcaataaatgttagcttattataggattattagtccatataatcaatttatctctaaagtatggggtataaatactgatgttttcaaataactgtagaagtgaattccttctaaaaatccatcttataatggcctcagagatttatattaattaatttatctctatttatttgtttgtagtgaaaaatttgccaaagaattcatttcaaaggtggctgtttcaccacacacactcataggaaaacattccttatttatgaggatttttgtgccttgaattaacatcccctgaccatcaagaaagaaacagttcttacaaaatagaaatgatttttctgcaaagaaccgctgttccaagtttatggaaattgattcaatatttgccctaattcctgtgtcaaaatctggtgtaaaaagttctaggtttatctactgcctgagacatacaatggtctgagtggtatttcaccacaagggttcctgaagaaagttttactagatcttcccctcttgaaagcaaaagatgagtttttgaaaactaaactactgatctaaagctcaacactcaaatgtaacacacaagattgctatcaatactatttatattggaggattttcatttcttgtggtcagtaatgccaggtatatccagggatttgtaccagcctgtggcaaccctagctgtacagtgtgagcaacctatagttataagccctaggtacagagtcttaccaactttctacttgccacctggattctgtgtaccttcatctggagtgggagccagaatgcctacttcaaatcatacctctacaacttaataactaaatgaccttgggcaaattaccctttcagggcctcagtttttccatctgtaaaacgggaataataacagcacgttcctcaaagagccactgtgaagattaaatgaataaatgaatgcaaagcacttagcatggtgcctggcattcattcattgaacaaatatttaccgagcgtcaactatgtgctaagtactgttttaggcactgaggttgcaggtaaaaaatcctgccttccttgatcttccccaagtagaattacttggggaaaccaggctaaaataataataaacaggcaaattatagagcatgttagaaggtaatgaatgtcatagaaaaattaaacaagagaaggggcatccaggcagccagcaagtgtcgggattatgattttaacaagatatgagggaagacttcactgagatgacattttagctgtagcatttgaggatgatgaggtgtgagcgatggggataattggggaaagagtgttccaggtggcagaaaattgccagtgcaaaggtcctgagggcaggatactctctgccacattcaaggaacagtcagggggtcagaaggggtcaatagtaatatattttgaaggtagaatcaaggggattgggtggggtgagatgtgaaagaaagaggagtcaggagtgattccaagggtttgtcttgggcaagtaaagggatggcattgccctgtcctggggcagtgagttggccagcctactcttttgtatttttttaaatttacatccactttttattccttcatagattttaacaattatacacaacttttaacataaaggtagtgaaatctcaaggataaggaagctatatatatgtatatacacacatacatatacatatacacacacatatatatacatatatacacacacatatacacacacacacacacacacacacacatatatatatatggcttcttctattcattcttcaggatggaaggaaatttccaaagggttacaatgtgtgagatttaacaatggaaaaatacatatgaaacttgtttaactggctccacttaagaccaggcacagcacaataaatacagaactgcatcatctttttaaaattttgtattgctttatgacacatgcacacgtatgtttattgcagcactattcacaatagcaaatacttggaaccaacccaaatgtccaacaatgatagactggattaagaaaatgtggcacatatacaccatggaatactatgcagccataaaaaaggatgagttcatgtcctttgtagggacatggatgaaattggaaatcatcattctcagtaaactatcgcaaggacaaaaaaccaaacaccgcatgttctcactcataggtgggaattgaacaatgaaaacacatggacacaggaagggaaacatcacactctggggactgttgtggggtggggggagggaggagggatagcattaggagatatacctaatgctaaatgacgagttaatgggtgcagcacaccagcatggcacaggtatacatatgtaactaacctgcacattgtgcacatgtaccctaaaacttaaagtataataatagtaaaataaaataaaattaaataaataaataaaaaatgaaataaaattttgtatgctttataatgaaaaattccaggatttgatctggactctcatctaatgccaaagctggtcctccactccatattcccattcactggcgattaaacctcagtccctccaggacaccctggacacagtggctgaactaacccatcaacagagtatattgaagacactttcccactcagcattaattcctgggctaagttagcttgaattaaagctcagtgagatggaagtgatttcccaagggccccatcacaagtcagaactggagtttccagcttataaaaactcatcctacttggcatgaataatacttctcctctaaagcagcagttcttaaccttctggagatcttgggccactctgagaatccaatggaaatgatagaccacatcccctggaaatgcacctaagcattcacggctgcatagatcatttctggaggttcataggctcctctttaaagctcacctgtaaacctgctcaggaaacctgggctatgaggcaaagttgaaaataactgcattggctgggcgcagtggctcatgcctgtaaccctagcactttgagaggccgaggcaggaggattgctttaggctgagagttcaagaccaacctagccaacatagcaagatcctgtctctttttaaaaaattgtttattaaaaagaaattttaaaataagaaaataactaaatttttcctagatatttattattttgaatagatgatagatatacaaggtagaaaaacaccaaaataaaataggaaaaagggtattcgatggcacactcctttcttttagcatctcagttctcatgaccagatgcattcacctctaacaggtccttctgcagacacccagagatgaagggagggctgtcccttgcctttcgcacagaaggtaggttcttggtttttctcacttaaccagctcttatcgattaatacttagggatcttttaatctcttgccattaaagaaaatattatgataaataaccttgaacatcactgtttatgctcatttaggagtatgtctgtagcaaaagctcccagaagtgggattgcaggtccctaggatgtgtgtattttatatttaatagatcttccaagttgccctccaaaggagctctaccaatttacacttccaccaacaaaattaccaagtattttaaaaatactaccacatacttctcagaactcaaactattaaattttttaataaaagaaatccattataattaaatctttcctgacttctcttaaatagtccatgttcattccacaaattattctcacaaataaaaaacaacagtctaactcacccattcacacttacctccggccaaaaagcaaaggcaggcacacaggtaagcctttggaatgctcatctgttaagagggactctttcttgacaataacccctccaccccactattaacggatagacacccaattgttaatatcttatgagaattgaaatttgtttcaattccaaaggaacttcatatgaagagagaaaagtttgaaagatcaaaatccccagggaaaagaaaaaatgtcaaggccagaatccattctcatgtcaattagttccagtgaagagctactgactcacagtttccaatgttgccaaagcaattgctcattaagacaaattgagaccatgtctaacccttctgttttcccttcattctgagtagaacgacccatgctttcagaattagatacatggcaccaagcacatttaagaattaacaagaaatgttattaaataaagtgtgtggggagaaaagtgcatttgaatatggatgaatcagacaagattctgtccatgagttgcaagagactaaagattcaactctaactgcattagggaaaaaaaaaaaaattcatagatagatcacccatggggcatgttttgattcaggtgtcaaacaaataccatccaggaatagtctcccccccatctcttggctctgcccttcttcacactgacattctcaaaaaaaatggttcccagcctgcggacctaaatcccatcatgggaaagacagcatctcctcctctgaacacctgggacaaaactgctggactctgaaccagaccccgaaccatgcccatcattgcactggtcctgcaccttagaggaaggaggaggacaaagtttgtttccactcttcctcttccactctcgcttcagaaacatcctcctgggtaagggaagaatggttcgaaggaaatacactggctttttattagtaggtgctattcgtagttcccccctgactctcaaatgtcccattgatatggtttggctgtgtccccacccaaatctcatcttgaattgtagctcccataatccccacgtgctgtggaagggacccggtgggagataattgaatcatgggggcaatttccttctcatggtagtgaatacatctaacgagatttgatggttttataaggggaaactcctttcacttggttctcattctgtcttgtctaccaccatataagacgtgcctttcaccttccgccatgactgtgaggcctccccagccacatggaactgtaagtccattaaacctctttttatttataaattacccagtctctgtaatatctttatcagaagtgtgaaaacggactaatacacctgtcaaggagagcatcctaatgccagctccatcaggtagcatgtcggggaattatttaaaaaatgcacactctcacttttattagggccccctgataatgcacaatttcctaacagagtttatgactttctggtctacaccttgtaggctcccttaactcttgccttaaggttactctttggagtcccttgccctgactgacatcccactgtggctcatagccagttgcttgccacagcatcttcttgacccatgggaaaacgggcattacagtcccagcaaccttagtaagtgcagggagcttcttctgctaccttttctttctttctcctaccatttggagctgctctagacagctccctgccttcaggctcctctaggcaaggagcaggcaccagtacccttggtccccaaatgcctgcatgtcaggctctcctaaactctcgtttgtgttctgctccagaagtactgggggtatggggtggaaagtccacagattttgataatagccaaaaagtagaaacaatacagaggcccatcaactgatgatgaatgcataaataaatggtggtacattcatataatgaaatatcattctacactaaaaagaaataaaattggaacaactggatatccacatgcaaaagaatgaatttgaacctctagctcacaacatatacaaaaattaactcaaaatgggtcagagacctaaatgtaagagataaaactataacacttttagaagaaagcatggggtaaatcttcatgatttacccctatggcaatgaattcttagaaattataataaaagcacaaacaacaatgaaaaaataaattggacctcatcaaagttaaaacttttttcatcaaaggacactttcaagaaagggaaaagacaacttacagaatgggagaaaatatttaaaagttatatatctaataaaagtctagtatccagaatatatgaagaattattgcaactcaacaaaaagaaaaacaacccaatttttaaaatgggcaaaggcttgaattgttatttctctagagaagatatacaaatggctaataagcatgtgaaaattgcttatgacatgacatcattagtcattaggagatgccttcttacactcactagaatggctataacctaaaacatagaaaataagtgatcgcacagatgtaaagaaattggaacccttgcatgttgctggtggaaatgtaatagggtgctgtcactttagaagaaaatagtttggcagttcctcaaaaagttaaatatagaattatcatatgacttagcaattccactcctaggtatttaccctaaggaattgaaaacaagtattcaaatacttacacacaaatgttcacagcagcactattcacaatagccaaaaggtggaaataactcaaaatgtccgtcagctaatgaatggataaacaaaatgtgacatatccatacaatggaatattattcagccacaaaaaaggataaaatactgagatatgctacaacatgcatgaacctcaataacattacactaagtggaaaaaataaactagacacaaacagtaacatattgtatgattccatccagaacagataaatccatagaaacataaagcagattagtggttgtcaggaactgggagaaggaaaacaatgggtaatgactgcttcctgaggacggggtttctttttgtacagatgaaagtatctcggaactagatagaggcaatgggatggttgcaaaatattctgaaagtactaaatgccacaaaattgaacactttaaaatagttaatagttatctttctattatatgaattttatctcaattttttaaaataatttttaagagataaatgaagtactgacacattctatgaaatgaatgtgccttgaaaacatcgtgctaaataaaagcagcccattaccaagcatcacatactgtatcatgccagaataggcaaatctagagacagaaagcagattaatggtggtctggggctgcagggagatgcagggcctggggcatgacagctaaagtgtgcatggtttcttttttaaagaataaaaatgttctaaaattgattgaggtgattgctgcacaactctgtgaacataataaaagccattgaattgcatatactttaaatgggtggatggtatggtaagtgaattataactcaaagaagctgattaaaactaaaacaaacaaacaaacaaacaaacaaatgagcttagaataagattgtagcccagagcctctggagaaagagaaatcctggctaacgctttgcattcagcctgtgtattcaggccccagtcacactgggccagatttctgaactataaaactatgaactaataaatgagggttgttttaagccactaagcttgtggtaatttgttacacagcaatagaaaactaatacatgtgcccttgagctgcaggagagatttccagatgtttctgtgaatctatgagttcccagtttgcagaggaggagggactgccaattgatgggatttgcctgggaggaagacagcctccctcaaattactgagctcaacaataatgagacataggcaggaaggcagccaccacaaccaggctgaaaattgaaaccacggagccacacagctgggccgatggcacaaggaaaattacaaactcggtccgtctttctcatacactgtccctgcactttgtttctttccttcataggactcatgagaatttacacacagatcatgtattttcttcttcctttattcacctctctccatcactaaaatgtaaacaccagtggtggacaggtcatgtctaccttattcaatatctactttcccagctccccagagactggggaggggaggggagaagtaaggaggagagaggttggtcaacaggtacaaagttataattacataggagggataatttctggtgtgctattgcgcagtgggttgaacagcaaggtacagtatattacaaaacagctagaagagaggctttctaatgtccttgccacaaagaaataagtgcatgggtgaccattacactaagtactctcatttggtcattacacaactatatgtgtattgaagcatcaaattgtacacttacccaaaaattacattaaaagtatataaataagaaaaacagatcgtggcggatgggagacaggactagattgcagctccagacagagcagcttgcggaggcttgcattgtgaatttgagctccagattgactgcaagaacaaaccagcaattctgagaggacctacagaccctctgaaggaagaggacttcctgcaggacccaggagacaccccaaatactgtgagtcccccagctgtggaagtggaaaagagagaccctcctctcccgaacacacaacctcactggaataagctgaagatctgcttgcagcagaagtttctgactttacctggaactgaggtcaatttagagagccgagaaaaatacaggggtggaagaagcagcggaaaggccctgggaggtcattgcatctcctagcaggtcgttactgcctggcaccacaaggatccatcaggagggtgaccagaggagcagcaggtaaaattctacagggagaaggacttctctagctgaactttgtaacaatttgaacagggcgagaagcctcccggccagaacttgtgggaggatgcaaatccggtgtgcagacaccacaggtgggggaagaaccaagcccttctctttcgcagctgggaggcgagtagcctggggaaagttttcaagtccttcaggccctccacctggaagtggactcaggactgttgggggcagggggatgggcatggcaggagtgagaccgttccttcggtttgcatgggagctgggtgaggcctgtaactgctgactttcccccacttccctgacaacctgcaactcagcagaggcagccataatcctgggtacccaactccagtgatctgggaatctcacccctaccccccacagcagccacagcaagacctgctcaagaagagtctgagttcagacacgcctagccccacccccacctgatggtccttccctgtacaccctggtagcagatgacaaagagcatataatcttgggcgttctagggccccgctcactgccagtccctctctatattactacagctgatgctttctgtaaagcaccacctcctggcaggaggccaaccagcacaaaaatagagcattaaaccaccaaagctaagaaccctcatggagtccattgcaccccactgccacctccactggaacaggcccaggtatacacagtgagagacccacagatggttcacatcacaggactctgtgcagacaacccccaacaccagcctggagcctggtagactcgctgggtgactagatccagaagagagacaacaatcactgcagtttggctcataggaagccataggaaaagggggagagtactttccttttccataggaaaagggggagagtactacattaagggaataccccataggacagaagaatctgaacaacagccttctgccctagaccttccctctgacagagcctatccaaatgagaaggaaccagaaaaccaaccctggtaatatgacaaaacaaggctctttgacacccccagaaagtcacatgagttcaccagcaatggatccaaaccaaaaagaaatccctgatttacctgaaaaagaattcaggaggttagttattaagctaatcagggagggaccagagaaaggtaaagcccaatgcaaggaaatccaaaaaatgatacaagaagtgaagggagaaatatccaaggaaatagatgcttaaataaaaaaacaacataaattcaggaaactttggacacactttttagaaatgtgaaatgctctggaaagtctcagtaatagaattgaacaagtggaagaaagaaattcagagctcaaagacaaggtctttgaattaatccaatccaacaaagacaaaggaaaaagaataagaaaatatggacaaagtctccaagaagtctgggattatgttaaactaccaaacttaagaataattgatgttcctgagaaagaagagaattctaacagcttggaaagcatattctggggaataatcaaggaaaacttccccagcctttttagagacctggacatccaactacaagaagcacaaagaacacatggaaaattcatcacagaaagatcgtcacctaggcacatcgtcatcaggttatccaaagttaagacaaaggaaagaatcttaagagctatgagacagaagcaccaggtaacctataaaggaaaacctatcagattcacagcagatttctcagcagaaaccctacaagctagaagggattgcggccctatcttcagccttcgcaaacaaaacaattatcagccaagaattttgtagcccccaaaactaagcatcatatatgaaggaaagatacagttgttttcagacaaacaaatgctgagagaatttgccattaccaagccaccattacaagaactgctaaaaggagctctaaatcttgaaacaaatcatggaaacacatcaaaacagaacctctttaaagcataaatcacacaggacctataaaacaaaaatatatgttaaaaagctaaaacacaaaaacaaaaaaccacagtacacaggcaacgaaaagcatgatgaatgcaacggtacctcacgtttcaatactaacattgaatgtaaatggcctaaatgttccacttaaaagatacagaactggcctggcatggtggctcatgcctgtaatcccagcactttgggaggctgaggtgggtggatcacgaggtcaggagattgagatcatcctggctaacacggtgaaaccccatctctactaaaaatacaaaaaattattcgggcatgatggcaggtgactgtactcccagctactcgggagtataagagaatggtgtgaacctgggaggtggagcttgtagtgagcggaaatcgcgccactgcactccagcctgggcggcagagtgagactccgtctcaaaaaaaaaaaaaaaaaaagatacagaaccacagaatggctaagaactcaccaaccatcagctgccttcaggagactcacctatcacataaggactcacataaactaaaataaaggagaggaaacaggcatttcatacaaattggacaccaaaagcaagagaaaaaacaaattttaaagcaacagcagttaaaagagacaaagagggatggtacattatataacggtaaaaggccttctccaacaggaaaatatcacaattctaaacatatacgcacctaacgctggagctcccaaatttataaaataattactaatagacctaagaaatgaagtagacagcaacgcaataatagtgggggacttcaatactccactgacaggtcatcaagacagaaagtcaacaaagaaacaatggatttaaagcataccttggaacaaatagacttaacaaatatgtacagaccatttcatccaataactgtagaatatacattgtattcaacagcacatggaactttctccaagatagatcatatgataggccataaaacgagcctcaataaagttaaggaaattgaaattatatcaagcactctctctgaccacagtggaataaacctggaaatcaactccaaaaggaaccttcagaaccgtgcaaatacatggaaattaaataatctgctcctgaatgaacattaggtcaaaaacaaaatcaagatggaaattttaaaaaccttcgaactgaatgacaataatgacacaacctatcaaaacctctgagatacagcaaaggtagtgttaagaggaaagttcctagccctaagtgcctacatcaaaacgactgaaagagcacaaactgacattctaaggtcacaccacaaggaactagagaaacaagaacaaaccaaacccaaacccagcagaagaaaggaaatgaccaagatcagaccagaactaaatgaaattgaaacaacaacaacaaacagaatacgtaagataaatgaaacaaaaagctggttctttgaaaagataaataaaattgatagaccattagcaagattaaccaataaaagaagagagaaaatccaaataacctcactaagaaatgaaacaggagatgttacaactgacaccattgaaactcaaaagatcattcaaggctactatgaacacctctatgcaaataagctagaaaacctagaagagatggataaattcctggaaaaatacaaccctcctagcttaaatcaggaagaattagataccctgaacagacccataacaagcagtgagattgaaatggcaattttaaaattaccaacaaaaaaaattccaggaccagatggttcagaacagaattctaccagacattcaaagaattggtaccagtccttttgacactattccacaatatagagaaagaaagaatcctccctaattcattttatgaagccagcaccaccctaataccaaaaacagagaatcaaatcaagaactcaaccttttttacaatagctgcaaaaaataaaataaaataaaatacttagaaacatacctaaccaaccagtcgaaagacctctacaaggaaaactacaaaacactgctgaaagaaatcatagatgacacaaacaagtggaaacacatcccatgcttatggatgggtagaatcaatattgtgaaaatgaccacaatgccaaaagcaatctacaagttcaacacaatccccatcaaaataccaccatcattcttcacagaattagaaaaaacaattctaaaatttatatggaaccaaaaaaagagcccgcatagccaaagcaagactaagcaaaaagaataaatctggaggcatcacactatctgatttcaaactatactatgaggccatagtcaccaaaatagcgtgatactggtataaaaataggcacatagaccaatggaacagaatagagaacccagaaataaacccaaatacttacagccaactgatcttcaacaaagcaaacaaaaatataaagtgaggaaaggacacccttttcaacaaacggtgctgggataattggcaagccacatgtaggagaatgaaactggaccctcatctctcatcatatacaaaaattaactcaaggtggattaagggcttaaacctaagacctgtaactataaaaattctagaagacaacattggaaaaacccttctagacattggcttaggcaaggatttcatgaccaggaacccaaaatcaaatgcaataaaaacaaagataaatagctgggacctaattaaactaaagagcttttgcacagcaaaaggaacagtcagcaaagtaaacagacaacccacacagtagaagaaaatcttcagaatctgtacatctgacaaaggactaatatccagaatctacaacaaactcaaacaaatcaataaaaaaaaacaaataatcccatcaaaaagtgtgctaaggacgtgaatagacaattctcaaaagaagatatacaaatggcaaacaaacatatgaaaaaatgctcaacatcactaactatcagggaaattcaaatcaaaaccacaatgtgatatcaccttactcctgcaagaatggccatattcaaaaaatcaaaaaacagtagatgttggcatggatgcggcgtacagggaacgcttctacactgctggtgggaatgtaaactagtacagccactatgggaaacagtctggagattcttgaaagaactaaaagtagaactaccatttgatccagcaaccccactactgggtatctacccagaggaaaagaagtcattatttgaaaaagatactagcatatgcatgtttatagcagcacagttcacaatagcaaaatcgtggaaccaacccaaaggctcatcaatcaacaagtggatgaagaaactgtggtatgtatatatatatagagagagagatagctatatatagatatatagatatatctatatacagagagaaagagaatatatatatagaatatatataacagtacaatgctatgcagccataaaaatgaatgaattaacagcatttgcagtgacctggatgagattggagactattattctaagtgaagtaactcaggaatggaaaaccaaacatcatatgtcttcactgatatgtgggagctaagctacgaggatgcaatggcataaaaatgatacaatggactttgggaacttatggggaagagtaggagtggggcaagggataaaagatcacaaatattgtgcagtgtatacatactgctcgggtgaagggtgcaccaaaatctcacaaatcaccactaaagaacttacttaagtaatcaaataccatctgtaccccaataacttatggaaaaataaataaaaaattaaaatacatatgaaaaggcttcttaagaaatcaaatattctcagttttcacagcatctagtccatgcccagcccaggtagagaagagggtcagggacatctggctgataggaacctgaggcagcttgcaagagggaggccccactagacaaaaagtgctccccagcagaccatgggctccgtgtggacagggaccttgtcttgttcactgctgtgtcttcagcactaagaatagtgcccagtacacaatgggcattcaagaaatatttgctgaaagaactaaatatttaaactaaaatactaggagattataggtatgggcatagcaaggatctcccctcgagtggaattccaacttgcaaaagcatgcttgtcacactggcagtcctattagggtgtctcaacctgggcactattgacatctggggccgatcatcccctacagtggggactgtcctgtgcgtcatggggtgttaacagcatccctggcttctattctctagatgccagtacaacgacctctgcaagttgtaccaactacatgggtctccagacttttccaaaatgtctactgtgggacaaaatcaccttctcttcctctccacgctcacacagtgagagccaccgagtcccacacagcagtgcctaatccatgttaaaacatggtctgagagcctcagagacttttgctggaacaaggaagtgtgcaccaggatgctctgcttgccttcctttcctgtatgaaattgatcagctccgtttcaggagaaacgagaaggaggcaggaggactctgcagcttaccacgaggtgattctggctccaggcaccactggggctgggaaaaggccttgaagttcaagccatgttgatttctgcaaaacttgccaagtgcatttttccaagtgtatggctgtggtaacatctggatttgatctgaaatgagggctgtcttctctcaccctgggatgcaaaaccaattccagtctaaaccacagtatttaacattttaaatgaaagttgctggaacaggagtaagccacaccatttttgtcgttacaaaaggctggagaggaaagaatgcttctttcatcaaaaatattactgaattaaagaaaaataaagatcatggtttctcttactttgtatgtgtgtgatattaacaaggaacaagcagtgaagagagcctacagacatcaaagaattttgtaaatggcacagtgaagcaagcccctgtacacttagaatctcattcccccaagagagattcttctcagaattttctcttcaaatacacgtgttcagcagaaacaagtccaccttcctaatgaactacaaggaacagcacagaagtcagtgagggccttgagttcaaaacagcctctcacattcacccttcctcccctctttcaaacacaaagaggaacaagggtgttttgatcttaaatgtcacatctgctccgtggcattcctcatcctgctccttgacagaatatcagaggaaaggtcaatcacaagagaatgttcaattccagattgtgaaaggaaagttcaggttggtgttcatggagcattttgcttgaatgtgacctataccttacaggcaagggagcatgcaggggttagagagtactctagaaggtcctttttaaaatatatttccaaggcacaggacattttcttcagacaaaatgttacatagatactcagtaaaaagaagaaataaaaggagcctttttcagagaaatggaatgtctagaatccaatgctcagcctgccactgttccaaaacctcagcacatgcaccaaaataacctggagctctctgctctgggatctgaggtttttcctttggtgtttggttgctccacggacttgcaagtgaccctccctgcatctcgagctagcagctgtctactcgccctcccgctcccatccccttctcgccttctccaccctgctctgtgccctaggagctgacctctaagaactgtcttacccaagctccctttaaccctggtttccagctgggagtggccaatgggaggcagcagctggaggaaagagtggccacggtatttcttccccacacattggtctgctcaaagcaccatggaccatgggacttcaacaacagaagtgtattttctcatgattcaagaggctggaagttcagtattaagttgctggcatggtttgtttcctctgagacccctccccttggcttgcaggtggatgtctcttgctgccccttcacagggtcatcctctgtctacggtgcctctttcgcttcttataaggatgctaggcaaattggattagagtccaccctaacagccttcttttaattctgtcactttgttaaagaccctatctctaaatacagtcacattctgaaggacagagggctaggacttcaacatataaatctgaggggacaccgttcattccatcactcccctttcccaccttcctaggctctgacctgacagtggccacaccccccacagatacagtatctgccaagcaggccctgctcgtggagacggttctccatttcttcctccacccccgagtgaagcattttgaaagtttcctataaagagtccctgggagggacatcctatattggttccctcaacccagcccatagcactgtgcataggtccttcattcattcttctcagttaagcccttttcagtgggtcttccaaggaatggctaaggaatgggcttgacccttccctaaattgtcgctataattttgcagcaagatgaaaggacccagggaagcaagtggtaggtatgtgggggcagtggagggattctcaacacattgaaggccctctttataaccacatcactaggtgatgacttcacctccaattccaaagttctgtgaaaaaactgtttagatgtgtacctggctgtgtgtgtgaaaattacagatcacaaaggtatttgcagtcatgtgcatttgcaagatagtcatctctataatttgcctaagacagggaacctgttcccaaccttggaactattgcacaatcaacattttggcccagatatttctcttttgtgggagctgtcttgtgcattataggatgttcagtagcatccaactcccaagttgtggcaactaaaaattaaggctggtggctgtgtgtcctccatttagggaagacttgggcaaaaggaacctctgccacaatcccagtgctttagaaagcctggctctcatcttcctccaccctccccatattcccctttccactagaggtgtccatgcaacaaaaaggatgtacccacccagggcccagagccctcttcaagaatcccctctagttacttgggtccagaattgcctgccaaatgacccacaccaacttccaaagactgactgggtctctttcctgggtttgatacatgctaatgtgtaaggtgacaaaggggtggctatttttatggggtatggatgaagcttggctgtacctgctgatccaggtatttacacgtgcatgtccaagcttgcccatgatgcagaacagagcaggaagataaacagggtgtggccaggtgcaatggctcacgcctgtaatcccagcactttgggaggccgaggcaggcagatcacgaggtctggagatctagaccatcctggctaacacagtgaaaccctgtctctactaaaaatacaaaaaaaatccgggcgtggtggcaggcacctgtagtcccaactactcgggaggctgaggcaggagaatggcgcgaacccaggaggcagaacttgcagtgagccaagatcgcaccactgcactccagcctgggcgacagagcgagactccgtctcaaaaaaaaaaaaaaaaaagataaacggggtgagccaagagtaggggccagccctcctcacactgccaaggtctgaggtgaaactctgaggagtccaagaactctaaatttaaactttacgtactaggtcattatggaggtgtattcgtgaaagtagaaggcccagatggtgctatttagcactctgtcagattgatgcatgaccattaaacacgtagatgtacagaatgtggatctccatttatactctagacaaatgtcttactcaaatggccacacaaatgttaggggcaggtgcctggcgctcatatctgaacagcctcagagagcagggaaggactggttcctgggccatctgggcatatggggtatctggaagtgcagccattttggtaccccaaagtgacacataaacaccatattgagcaccaaaccttcaagggtggcattgaggttagaagagatttcaagaagcctggcagccagatgtgaggaatagcacaacagtgacctgtgtgcatcagtgcctggagaccagaacaagggcaatgggagtctcagagggcacccaaatgaacaatggcatcaagagccagatagctgcaaagtttaattgctcagtgctgtgtaagcccccagaaacacagacacaacatcagaagagatcaatgttctaccacattggtaccaatgggtcttaaactagaaattaagtggaatcagaacaaagtcaaggtttatcaccggcacacctgagtcatgtttgaaggggcactcaggctacccacaggctttgtgctcagcctcacggcactgtccagcataaggtacatgtttagcaatggtttttgaactgtggttactaaactcgggttttttaatctatctgcatttcaaagtgcttggtttggatttgggggtaaaaaatgtggtccttgatatgccagtgcattaaggtcaagccttccctgaagaacattcacatttttttctacatagaagtggaatctagcttgttggttgtctgagagacaaaatgtattgctttgtaccatttaaatgttaagagggttttcatgtttttctgcaaaaagcctatttaccctgcactgagtttccccggcctcacagtatcacaggttagggagttccctttcattaaatggttctttagaccatgaaattttcttgttttgctttctaccaaattccaaattaattccagtccaaggtttaatagatcagatccatgaggtcattgtaacttcatattttatattaagcatgactactattaattgagggccagctttgtgatatgcatgctctatacattgtctctaatcctcctagatctcccaaggtaagtagcatttttcctaacaacagaactgaggctaagtgaaatcacataggaaagctagaacctgaacataagtctccatggtctcaaagcctgaactcaccactacagcatatagcaattgtaccctcattatctgaggtttcaattttgcaatgtccatattttgagttttacatcattttcctgctcctaattgcccagagtcatagtggactgcgtacaagcttcatttctccctccaaggttttgcagagaaaaattctattgtttggcccaggagccccaggtatcatttagggtgtgggaacaaagtgaaataggtacttcctttacaatgatgccaggcacctctcctccttccaggtacaacacatctctgtgtcttagatcttagctgcacctgggacaaaggctgttctctgcagaaagaagctaagagatcagagtagttgaaggtattgcaggtgtgcccactccaacactggggcatgcccagctcctttggaaaactcatgtgaataagagcctcagcaattcaggaaagtgaagcatgctgaaaagcaagggtcaaagtaaaaaaggtaagaaagagtactttttttattaaatataattcatttagcatcgaattcacccttttaacatgtacgattcattggtttttagaatattcactaagttgtgcaaccatcagcactatctaactctagaacattctcctcacaacaaaaagaaacctcatggctgggggcggtggcttatgcctgtagtcccagcactttgggaggctgaggcaggtggatcacttgaggtcaggagatcaataccagcctagccaacttggtaaagccctgtctctgctaaagacacaaaaattagccaggcgtgggggtgtggacctgtagtcccagctactcatgaggctgaggtgggagaatcgcttgaacccgggaggtggaggtttcagtgagccaagatcgtgccactgcactccagcctaggtgacagtgagactctgtcagaaaggaagaaaggaagagaaagagagagagagagagagagaaagaaagaaagaaagaaagaaagaaagaaagaaagaaagaaagaaagaaagaaagaaagaaagaaagaaagagaaagaaaggaaggaaggaaggaaggaaggaaggaaggaaggaaggaaggaaggaaggaaggaaggaagaaagaagaaaagaaaaaacaacctcatgctcattcgtggtgagtctctatgttccttttcccccaactcctgtgaaccattaatctactttcagtctttaatggagttgcttattctaaactttgtatgtaaatagaatcatgaactatttagccttttatgtctggtcattttcacttgccataatattttcagtgtttacctgtcttgtaatgtgtgtccatactttagtccttttttggctaaacaattgtatggatatagcacatttttaatccattcactaattgctagacatgtagggattttttccacttttttactattatgaaaaatgctactaggaaaatttgtgtacaggttgttatgtggacatatttcttcagttcttttgggcatatatctaggtgtggaacttctggatcatatgataactctacgtctataactttttgaagaaatcccaaactgtttttcaaaatgactgcaccattttatattcccaccagcaaggcatgagggcttccatttctccatatccttgccaacacttgtcattgttcatcttttatattataaacactctagtgggtataaagtgggtttggtttttatttgcattccctggaagactaaagccaacacgcccagtgcatgacttcttttgcagggaactgtccgtcacagaggtgctgaaatcatctgggttgaggagatgtggcatgaggcatcacagcctctgccttcaaatgttatgccagaataagacatcagaggagtcttgaaggtacagaaagaatttgccaagtcagccaggcatggcggctcacgcctgtaatcccagcacttcagtaggctgaggcgggcagatcacttgaagtcaggagtttgagaccagcctggccaacgttgtaaaatcccatctctactaaaaatacaaaaattagccaggcatgatggcatgtgactgtaataccagctactcaggaggctgagggacaagaatcacttgaactcaggaggcagaggttgcagtgggctgagatcacaccactgcactccaggctgggagacagagtgagactctgtctcaaaaaaaaaaaaaaaaaaaaaagaatttaccaagtagatgagagatgaagaagagcatttcaggcagtgcaaacggtatatgcagaaatgtaaaggcagaacacagaatggcacatttgacatgttacattagttctgaaggctcggtgtagaatatgcaaaaggagaataataagtgaggaggttgaagaggtacaccaaggccagatcacagagtgccatgtatgctatactaaaatattagagctttatgccataggcaatgggaagctactagagactttttaatcagtgacataaatgacaaggcaaagagtttaaaaaaagaactttctgtgtgaggaataacagggagggagataaggagatcagtaaggctgaggtgggtgttcaggagagaaataaccaaggtcaaagctgaaagacaaaataagggaccttttctaggacatattcctaacctgctacaaaggttggtgtcctgcatttcagcaggacctgggagttttgttatctgtatattggtattaatgtgatctcagttgtatcttcaggctggggaggtctgggagaatacttaatgaaatgctgattgttttcaataggaaaatacacttcaactggactacagtaaccaagaacctttcttctgtgttattaagacacaaaaggcaagatttcagctcatactcttttaaccaagccagaattaactttttgttataactgaagaagcaataaacctcaaggcttggatagtccctatctgtttgcatttactcttcaatttcctgcctgaatcacacctccaccttcccttaaaggtgaaagcctatggccaggcatggtggctcacacctgtaatcccagcactttgggaggtcaaggcgggtgggtcaaaggtcaggagttcgagaccagctgaccaacatggtgaaaccccatctctactaaaaatacaaaattagctgggcgtggtggcatgcacctgtaatcccagctactcaggaggctgaggcaggaaaatcggttgattccagaaggtagaggctgcagtgagccgagattgtaccattgcactccagcctgggcgacagagtgagactctgtctcaaaaaaaaaaaaaaaaaaaagcctattagagaacctgcaaagtaaaaacagagaggcaataagggagaagcaaggcatgaaggaccctcaggggtagggatgtaatgaatatctgtctactttgactgcccaatatcttgagactacttccttactgtgaaagcaagtctcgaaccaaaagcagagaagaaaaattaacttgcaaataagttgcaaaggaatctaagatttgggagttccagctcatcaagtaaaaacacagcaagtatttaaaataaaaaaccgcacaagataatcaagattttcaagtttacaattagtttctttgtagtaaaataaaaaaatagcacctttctcaggtgattattatacctctaaaggttgtgacatatcttcccatatcagccttacaaaaatcaatgataaaaatgtcttgttagggagtcaataacctatgtaaaatcctcaaagttccatttattttgagtgctaaaactaaacagggttacctggtatattggtttgttttctggtgcaatatgtttgcttgttggccatggaatatgatttgcacacatatttgtaatggtggcaaggcaaaattttagttttcaccttttggtggtttcaggctgcatcgatgaaactgcctttaaaaattatgacaataagagaaacctgacataactgactccatcttgattctaacctctaagctgcccttgttcattcctgggcataggccaacctaactttgggaggaatttagtccatagtttcatcttaaagcaaagatgacaatagcctttcccaaaactacccccaaccttgttcaagactaaaactgcctttgttaaaaaaaaaaaaaaactaactaaaggccacaagaataggattatgagaggggcctgaattctgtcaagatgtaggcataaatgataaccagccattgttctggaggtcacaagatttgtaacttctccaatcactcctatagataatatcactattgtagaacctaagattggtattttgagattttttcagacttctgcatttctccaaacgaatgacctcaccccagatctaggactcctgactcaactagtcctgtggtccctacctagaggctgactcaggacaaaaggaccgccttccacacccctgtgatttcatcccgatccaatcagctgcacccattccctagtcccctgcccaccaaatcatcctttaaaagtccggtctctaaattttcagagagactgattcaagtaataaacccttgtcctttcacgtggctaactttgcattaattaaactctttctttactgcaatacttctgtcagcaaatcagctctgcctgtgcagtgggcgaggggaatccatcaggcaattacactgaaagccctgccttcccatggtagcatccacctaccctgcttctgttgcagctggggcaggttaacatacgtgagattctgattcagaagtctgcagtgtgaggaaataggctgcacatggcccaactactttgctagtgcagatggtggtagcagtggcagcgagaggcactgcagaaacatgaattttctggcagcctgggtgtggctatgagcagtttttctctatcaaggtagttctccagaactcctggaagcctagccctacacctgtttcttcagatccgtcatctcccaaaggctctgggtacctcctaacatcctttacaaaatgccttaatctaagcaggctggagtggattctgtggattccatctcagagcctgtgatcctaaaatttccctcctcccatatcttatgtatgagttttaagcagaatgggtggcctttgccttttcgaagtttgttctggctgctgtcagagaacagactgaggggctggggtggataggggtgagaatggaagcagaaagactaggtgagaagcttttgctgaaacccaggtgcaaggtggtgatggcttggattaaggtagtagcagtgctgatgggaagaagagattaaagatacttggaggcagtgtcaacaagacgtgcagtggattggatgttagggacaggaaaaggaaagaatcaatagaactcctgtctttgaactgagaaaccaggtaattgaaggtggtgtttatagagatggagaagactagatgatgtagtttgggtatttgtcccctccaaatctcatgttgaaaatgtgatccccaatgttggaggcggggcctggtgggaggtgtttgggtcatggggggaacccctcatgaatggcttggtgccatacccttggtgatgagtgagttcttactctgttagttcatgcaaaagctgcttgtttaaaggagcctggctcctcctcctttctctcttgctccctacctctccatatgacacgcctgctccctcctcaccttctgccatgagtggaagcttcctgaagccctgactagaagcactgctgctgccatgcttgtacaacctgcagccaaataaacctcttttccttataaattacctagtttcaggtattctcttataccaatgcaaagtggactaacacagtacaggaaggagagcttaaaactggattggaaatcaaaaggtctttctaaaaatcaagggtgagacaggagagaaacaagaggcaacaacacatagtggttaatttttttttttttttttttttttgagatggagtcccgctctgtcacccaggctggagtgcggtcatgcaaccttggttcactgcaacctccgccccctaggttcaagcaattctcctgcctcagcctcccaagtagctgggaccacaggtgcacgccgtcacacctggctaatttttgtattttagtagagacagggtttcaccgtgttgcccaggctgggctcgaactcctgagctcaggcaatccacccacctcagcctcccaaagtgctaggattacaggcgtgagccactacgcccagcccatagtggttaaattgcataagcttgttttcttgtttgccaactaatgttgcctttgaccatattgaatctccttctcctgtgacatgcctttatttgttttgcctaaatgaattcttattgtggcaaaaaaaaacatagtgggctatgttttttatagacccatgggctctggagccagatgacctggtttcaaacccaaattccacatcctacgaactctgaggccagttcctcctcatgaagagatagataattattgtccctaccttaaagagttgtaatgaatattaagtacataaatatttcactacctggggaattactgttaatgagtatgagatttttttagagcgataaaaatgttctgaaattagatagcagtgatggttgcacaagtttctgtatactaaaatcactaaactgtacattttaaaagggtgatttttatggtatatgaattagatctttaaacatttttttgaagagcacttagggcatgcctgtttaaatgctaagagagtgttcattaaaagaaattcaaatgaattgcaaaaacaataaactaccttagattctaaagttgctattcttcaggccgggctattacaggtggtggctcatgtctgtaatcccagcactttcgaaggctgaggtgggtggatcacttgaggtcaggagttcgagaccagcctggccaacatggtgaaaccccatctctactaaaaatacaaaaattagccaggcaaggtggcatgcacctgtagtcccacctactcagtagactgaggcaggagaatcgtttgaacccaggaggcagaggttgcagtgagccgagatcgcgccacgccacaccactgcactccagccagggcaacgagggagacgctgtcccaaaaaaaataaaataaaataaagttgctattcttcaaatcctgtcagagttggcctcattcttgcagagccttcaacctcttcccccatccttcccatattttctcctatccccttcccctcaggtggttcccatcccaccccaagtctttctttgtgattaccttagaattcgagatgatactttctaccttctatttcttgttccatcaactttccacagcatctctggactctcagtcttggtaaggtgccttctaactctcattcctttctctccacttctctactcacttcacaacttctattgaaataagtcctttgcttttatgtttctaaacagtattttttttgagatagggtcttgttctattgcccaggctagagtgctgtggcatgatcacagctcactgcagcttccacctgctgggatcaagtaagctgacccaccatataaatgaagccaccttggaagtgagtcatccacccccagtcaaagcttctggcaactgtagccctagtccacaggttgactgcaacctcatgaaaaatctggaagcagaaccacccagttaagctgtttctgaattcctgacccacagaaatatgtaaattatgataaatgtttcgaatttttttttttttgagatggagtctcactctgtcacccagactggagtgcagtggtgctatctcagctcaatgtaagctctgcctcccgggttcatgccattcttctgcctcagcctcccgagtagctgggactccgggcacccgccaccacacccggctaattttttgtatttttagtagagacggggtttcactatgatctcaatctcctgacctcgtgatccgcccgcctcggcctcccaaagtgctgggattacaggcatgaaccactgcacctggccaggattattttaagtcatggtaaggtaaggtaatttgttacacagaaatcaataactatggcagtttactggaaccacctaacatgttcatctcgcctactgcttggatacagccaaagacaggggaattgtaagagagagagagtttaatacatgtagagttggctaaataggagaccagggtttaattattactcaagtcagcctccccaaaaatttagaagccagggtttttttaaagatagtttggtgctcagggggctagagaatgggtgctgttgattggttgtggaatcacagaagtcatctggttgtcagaaatgcagaagtctgaaaagacatcttaaaaggccaatcttaggttctacaatagtgatgataggaagttacaaatcttgtgacctctggaacaatggctggttatcctttaactacacctacatcttaccagaattcaggcccctctcaaaatcctaactttgtggccttctaatggttttataaaggcagtttagttttgggaaggaccattatcatttaaattataaacaaatttctcccaaaattagcttggcccacacccagggatgaccaagggcagtttggagcttaaagacaagatagacttggttagatcagatgtctttcatgctcataattttctcactgttacaatttttgcaaaggcagttttattactgtggagtcagccaccctggggaagggctgtatttcatagtgcatggatagttccaaatagtagtatcctaagcgagataaagagatgggtttctcttggccaggcatggtggctcattcttatcatttcagcactttaaaaggccaaggtgggtggatcacttgggctcaggagttcaagaccagccttggcaacatggcaagacctcatctctacaaaaaaaaaatacaaaaattagctgggcatggtggcacacacctgcagacccagctactcaagaggctgaggcaggaggattgcttgagcctgggaggttgaggatgcagtgagctatgattgcactccagcgtgagcaacagagtgagaccatatctcaaaaaaaaaaaaaaaaaaaaaaaaacagagaaagtggccaaataggaacagctctggtctgcagctcccagcatgatcgatgcagaatatgggtgatttctgcatttccaacacaggtacctggttcatctcactgggcctggttggacagtgagtgcagcccacagatggtgagtcaaagcagggcagggcatcgcctcacctgggaagtgcaaggggtcaggggatttcccgttcctagccaagggaagccgtgacagactgtacgtggaaaaacaagacactctgcccaaatactgcacctttcccaaggtcttagcaatcggcagacaaggagattctctcctgtgcctggcttggcaggtcccatgcccatggagccttgctcactgctagcgcagcagtctgagatcaaactgcgaggtggcagcctggctgggggaggggcatccgccattgctgaggcttgagtaggtaaacaaagcagcccggaagcttgaactggacggagcccaccacagctttgtaaggcctactgcctctatagactccacctctgtgggcagggcatagatggacaaaaggcagcagacagcttctgcagacttaaacgtccctgtctgacagctctgaagagagcagtggtactctcagcatggcatttgagctctgagaacagacagactgcctcctcaagtgggtccctgacccccgtgtagcctaactgggagatacctgccagtaggggctgacagacacctcatataggcggctgcccctctgagacgaagcttccagaggaaggatcaggcaggaatctttgctgttctgcaatatttgctgttctgcagcctccactggtgatacccaggcaaacagggtctggagtggacctccagcaaactccaacagacctgcagctgagggacctgactattagaaggaaaactaacaaacagaaaggaatagcaccaacatcaacaaaaaggacatctataccaaaaccctatctgtaggtcaccaacatcaaagaccaaaggtagataaaaccacaaagatggggagaaaccagaacagaaaagttgaaaattctaaaaaccagagggcctcttctcctccaaaggattgcagctccttgccagcccagagaatgactttggcaagctgacagaagtaggcttcagaagatcggtaataacaaacttctccaagctaaaggagcatgttcaaacccatcgcacacaggctaaaaaccttgaaaaaaggttagatgaatggctaactacaataaacagtgtagaaaagaccttaagtgacctgacagagctgaaaaccatggcatgagaatttcatgatgcatgcacaagcttcaatagccgattcaatcaagtagaagaacaggtatcagtgattgaagatcaaattaatgaaataaggcaagcagacaaggttagaggaaaaagaggaaaaagaaaagaacaaagcctccagaaaatatgggactatgtgaaaagaccaaatctatgtttgacaggtgtacctgagagtggtggggagaacagaaccaagctggaaagcactattcaggatattatccaggagaacttccccaacctagcaaggcaggccaacgttcaaattcaggaaatacagagaacaccacaaagatactccttgagaagagcaaccccaagacacaaaattatcagattcaccaaggttgaaatgaaggaaaaaatgttaatggcagccagagagaaaggttgggttacccacaaagggaagcccatcagactaacagcggatctcttggcagaagccctacaagccagaagagagtggtggccaatattcaacattcttaaaggaaagaattttcaacccagaatttaatatccagccaaactaagcttcataagtgaaggaaaaataaaatcctttacaggcaagcaaatgctgagagattgtgtcaccaccagacctgccttacaagagctcctgaaggaagcactaaacatggaaagaaacaaccggtacccaccactgcaaaaacatgccaaattgtaaagaccattgatgttatgaagaaactgcataaattaatgggcaaaaaaaccagctaacctcataatgacaggaataaattcacacataacaatatattttttttttgagacggagtctcactctgtcacccaggctggattgcagtggtgcaatctcggctcactgcaagctctgcctcccaggttcacaccattctcctgcctcagcctcccgagtagctgggactacaggtgcccaccaccacacctggctaattttttgtagttttagtagagacagggtttcaccgtgttaggcaggatggtctcgatctcctgacctcgtgatccacccacctcagccttccaaagtgctgggattacaggtgtgagccactgtgcccagccacacataacaatatcaacctttaatgtaaatggactaaatgcccccaattaaaagacacagactggcaaattggataaagagccaagacccattagtgtgctgtattcaggagacccatctcacatgcagagacacacataggctcaaaataaagtgatggaggaagatctaccaagcaaatggaaagtaaaaaaaaacaggggttgcaatcctagtctctgataaaacagactttaaaccaacaaggatcaaaagagacaaagaaggccattacataatggtaaagggatcgattcaacaagaagaactaaatatcctaaatatatatgcacccaatacaggagcacccagattcataaagcaagtccttagagacctacaaagagacttagactcccacacaagaataatgggagatgttaacaccccactgtcaatattcgacagattaatgagacagaaggttaacaaggatataccagacttgaactcagctctgcaccaagcagacctaccagacatctacagaactctccaccctgaattaacagaatattcattcttctcagcaccacattgcacttattctaaaattgaccacataattggaagtaaagcactcctcagcaaacgtaaaagaacagaaatcacaacaaactgtctctcagaccacagtgcaatcaaattagaaccaggattaagaaagtcactcaaaatagcacaactacatggaaactgaacaacctgctcctgaatgactactgggtaaataacaaaatgaaggcagaaataaagatgttctttgaaaccagtgagaacaaacacacaatgtaccagaatctctgggacacatttaaagcagtgtgtggagggaaactcatagcactaaatgcccacaagagaaagcaggaaagatctgaaatcaacgccctaacatcacaattaaaagaaccagagaagcaagagcaaacaaattcaaaagctagcagaagacaagaaataactaagatcacagcagaactgaaagagatagagacacaaaaaacccttcaaaaaatcagtgaatccaggagctcgttttttgaaacaataaaatagatagaccgctagccagactaatgaagaaaagagagaagaatcaaatagatgcaataaaaaatgataaaggggatatcaccaccaatcccacagaaatacaaactactatcagagaatactataaacatctccatgcaaataaactagaaaatctaaaagaaatgcataaattcccggacacatacatccacccaagactaaaccaggaagaagttgaatctctgaatagaccaacaacaggctctgaaattgagtcaataattaataggctaccaaccaaaaaaagtccaggaccagatggattcacagccgaattctacaagaggtacaaagaggaggtgataccactccttctgaaactattccaatcaatagaaaaagagggaatcctctctaactcattttatgaggccagcatcatcctgataccaaagcctggcagagacacaacaaaaaaagagaattttagaccaatatccctggtgaacatcgatgtgaaaatcctcaataaaatactggcaaaccgaatccagcagcacatcaaaaagcttatccaccatgatcaagtgggcttcatccctgggatgcaaggctggttcaacgtacgcaaatcaatacacgtaatccatcacatcaacagaaccaataacaaaaaccacatgattatctcaatagatgcagaaaaggccttcgacaaaattcaacagcccttcatgctaaaaattctaaataaactaggtattgatggaacatacctcaaaataataaaagctatttatgacaaaaccacagccaatatcatactgaatgggcaaaaactggacgcattccatttgaaaaccagcacacgacaaggataccctttctcacaactcctattcaacatggtattggaagttctggctggggcaatcaggcaagagaaagaaataaagagtattcaattaggaagagaggaagtcaaactgtccctgtttgcagatgacatgattgtatatttagaaaaccccattgtgtcagcccaaaatctccttaagctgataagcaacttcagcaaactctcaggataaaaatcagaagcattcctttacaccaataacagacaaacagagagccaaatcatgagtgaactcccattcacaattgctacaaagagaataaaatacctaggaatccaacttacaagggacgtgaagtatgtcttcaaagagaactacaaaccactgctcaatgaaataaaagagaacacaaacaaatggaagaacattccatgctcaaggataggaagaatcgatatcgtgaaaatggccatactgcccaaggtgatttatagattcaatgccatcctcagcaagctatcaatgactttcttcacagaattggaaaaaactactttaaagttcatatggaaccaaaaaagagcccgcattgccaagacaatcctaagcagaaagaacaaagctggaggcatcacactacctgacttcaaactacactacaaggctacagtaaccaaaacagcatagtactggtaccaaaacagatatatagaccaatcgaacagaacagaggcctcagaaataacaccacacatctacaaccatctgatctttgacaaacctgacaaaaacaagaaatggggaaaagattccctatttaataaatggtgctgggaaaactggctagccatatgcagaaagctgaaactggatcccttccttacaccttatacaaaaattaattcaagatggattaaagacttaactgttagacctaaaaccgtaaaaaccctagaagaaaacctaggcaataccattcaggacataggcatgggcaaggacttcatgactaaaacactaaaagcaatggcaacaaaagccaaaatagacaaatgggatctaattaaactaaagagcttctgcacagcaaaagaaactactatcaggtgaacaggtaacccacagaatgggagatcttggttcactgcaacctctgcctctccagttcaagcaatgctcctgcctcagcctcctgagtagctgggattacaggtgcctgccaccatgcctgactaatttttgtatttttagtagagacggggtttcaccatgttgcccaggctggtctcgaacttctgacctcaagtgatccacctgcctcagcctcccaaattgctaggattacaggcatgagctaccacacctggagaagattctatttttaaacaggaccagagatcatcttgaacaaaggaactcacccactggtacatatctcaagaggaaagcataaatacactgatgcactttggcatcttgaattaatttttgtataaggtgtaagaaatcattccatacactcacattctattagtatttattcatttactaagacttacatatgccaagattgctgcaagcagccaaacgagattcattccattctatagactttatagcaagcttgtccaacccacagcctgagggctgcatgggctttgaatgcagcccaacacaaattcataaactttcttaaaacattatgagttttcttgtgattatttttaactcatcagctgttgttagtgttagtgtatttaatgtatggcccatgacaattcttccagcgtggcccagagaagccaaaagattggacacccccgctttatagcattgtttgcaaactggtgattgccagggccccatgcagcattcagaaatatttggtttgacctgtggattttctttttaaactcactgccaacatttaaaaatcaggagattttacattcttaaaacccagatattcagcttggatcagttagcattttctgtgtaacaaccaaccatttactctctcttgtttttgtcattcagcaatttgggctgggctcagccagatggttctgctggccagggccagcctggctgatctcagctgggcttgtccatgggtttgtagtcagctgccagatcagatgaggcaggctggccaagggtgtcctcggctgagatgctgtacgtggtctcatcttacagtggactagtttctaaagacaaaagccaaagggtgcaagacattttgagggctgggctcaaacgcacatgccatcatttctgctgtattctattagccagagcaagtgttaggccagcccagactcaaggggtggagaaagagactccaccctggatgggagggaaagaatttgtggccatttttgcaatctaccatacagttatcttaagagatcagtggatgtggccaccttaggccacatggccagcggtatccatgtgctagagcccagaagcagcttccttccttagacgggtgtgtttctcctgcacaagccttgtcctcgctgcttcactcatttatacgaccatctggccccgtgggcaagggagggcttgccattcctgatcccagaatgatctccctcctcaatgtatcccaaagccatgcccagccatgaacgcaattgttgtgccatacccagaaatcacttttcacttctcagaaaatctctccctctacttcccctatttccttcccctgccaatagctggtggaagaatctgcgggaggagtagggagaggttattcaataacctgaggatttagaaaaagggcagtttgggagccaaacagccttgggttccatgttggttccactccactcataatctctcagtttccccatctgtaaaactacctgctgtgttgccatattcctctttgaagatattgtgtcaagtcgtacgtagtgcataaatggggactcattttgatgtaatggaaaaaattaagaaaaaaagaaaatagaagagtagttaatgtcagttgcctgtttagctctgcagcgcccaagcctgatgaatttacgacaagcttccaaaaaaggcaattgcggcttgcggagggtctagaggctcagttgcccgaggctgtcttgaggagctgcctttgggactccgcgaaacctcgaagtcttgggctgcgcctccccttgcgcggtcggagccttggcagagcctgcggcgccacctcgtgggcgaggccgcctggtgcaaggtcatccggtgccgggacccgctcctcgccccgccaggacccccgctcacctccaagctggacgcccgcggagccctgatcccctaacgcccgcttccgaggccgagctctgcagccccctgcaaccatcagatccagattgccttcctgcacgagcgcgcaactctcagcctcggagcgtgctggaaatgctgatgggaaccgtttgaatgaccgggcacgggtctgcaagaaactcagctcccaggccagccgtggctcaggaagcctcccacgtcgggtagaatcccaggaatccacccttgcccccatcctcccttaacttccccaagcctcagttccttcatctgcaaaatcgaaatggtgataattccaacaccaataggggtgtgaccatctgcaccaagcactcagagcctggcatagaaagtgcagctcttcttattaattaggcctgaaactcctctgcataatagtaatgtaataatagtaatgtaataacaataataacaaatagtagtcttcactgtcatcatagtaaatggtagcaggtacatgggctatgcacttattatctcccaagcactaagactcttccgtgtatggaatgttttttgtttgttttgtttttttgagacggagtcttgccctgtcacccaggctggagtgcagtggcacaatctcagctcactgcaacttccggcttccaggttcaagcagtcctcctgcctcagcctccccaataggtgggattacaggcatgcaccaccgctcctggctaatttttgtatttgtaatagagatggagtttcaccatgttagccaggctggtctcaaactcctgacctcaagtgatccgcctgcctcccaaagtgctaggattacaggcgtgagccaccgtgcccggctggaacgtttttaaatgtcaagcattcccataaattcaagaacagtgttacctccatttcactgataagaaaataaactcagagatattaagtaattaatccaaggtcaactagcaagcaagcaggaggaccagaactcaaatgccaggttttcttcttggatacatattggcagaccaaatctctccccacttcctgccatttttcttggttatctattaaaaaggagaaactaaactaatcaagtggctttgtttcttctccacctgtcccaccactcccgccaacacccttccatgacgttcctcattgccacgctggcagggtggccctgggtatttgtccccatcttatagagagaacatggagaagctgagtggggctaaggagttcagatcactcacttgccacacccagaaatcagtaagttgttggggagtggtgggggtcgagctggaatccagagctccaagccatctctctccccaacacagacctgggtcacaacccttgtgatcaaacctgatgctttccaaggtattgccctttgcaaccttgtgaggctgactgagggaggttgctgagcaatgcttccaaattgctgaaggataaatgggagacagggcatacacacacacacacatgcacacacacacagatatacaccactccctggtcatctgagaatcaacatcaccttacaatgtccctgtgtctgagcattggcccacagtgttgaggagctgactaggatgtgattttagagaagattggagccctgggttctcacctgttagctgcctcctgacacgtccgctgatgtctcacaccaaccctggaatacaacttgtccaaagggacaatcttgatttacttccatatggcagcaattcccataaatgcctgaccatccagctgggtgctcggacgtgaagtctctagggcctccgtgggtcctcctttcctcgtcccacctccaggccatcaacattgtcaccactagagcccaagtcacatcctctctcacccagaattctgcacaaccctctcaatgggtctcccatttcctgtgttgcctcctccaactcattctctacccagcaagcgtcattggattgtgtcattcccctgattaaaacccctcaacagttaccccctgcagctaggctgaaatccacatggccatgaggccctgcagatcaggcttctggcagtttttccaagctgtctcatgcttcttgcatcattgccacgctggtcttcccagagtgctgcccccacctcccaatacgccaagttctcttcttcctttggaaatgcgccatgccatccccattcttggcagcctcttcccactgcaacccctgtgcgctccttctcccgctgcacacagcaagtgcatccttctggatgaggcctttctgatcacccaatgccaccacaattcatgatgctttcctcacttggctgttagtttgttgtgcatcacccacacccaactctaagctccataagagcaagggccaagctgtccaccccatcacccagcgcctggcatagcgctgggcaaattaacagactctataaatacttgaggagcgaactaatgatacaacagctacaagcccttataggagaatcatacgtgctgacaatcaataattcttaatatattttataataataatagccaacaccaatgtaggcctgctctgagccaggcactaccctaagcactttacatgtgtaaatgcatttaaccctcccaataaccccatcatgtacccagtattactatacccaccttggatatggggtgctgggtacatgatggggttattggggggattaaaggcgttcacacatgtaaggaaattgaggcacaggttaagtaacaggcccagtgtcacacagcaagcaggtggtgcaacttgagtttcagcccgagcttcactccagtgttcatgccctcagcctctaggcaacagtgcctaaatgttcatccactaacgaaaggggtgaaccaactctagcacaatgcagtgcagccatgtaaagaaagattaagctgccgggcacagtggctcacgcctgtaatcccagcactttgggaggccgaggcgggtggaccacttgaggtcaggagttcaagaccagcctggccaacatggtgaaaccccatttctactgaaaatactacatatatatatatatatatatatatatacacacacacacatatatatgtgtatatatacacacacacacacatacacacgtatatatgtatatatgtgtatataagtatatatacgtatatacatatatacgtatatgtgtgtatatatatacgtgtgtgtgtgtatatatatgtgtgtgtatatatatatatacacgtatatatacgtgtatatatatatacgtgtgtgtgtgtatatatatatatagccagccatggtggtgcgcgcctgtaaccccagctactcgggaggctgaggcagcagaatctcttaaacccaggaggtggaggttgcagtgagccaagatcgcgcccctgcactccagcctgggcgacagagcaaggctccatctcaaaaaaaaaaagaaaggaagaaagattaagcccctctgcctttaccagcatggacagatatcccgataggacagtgggtgaataagcgaatagagatcaacatgttttaatcccatttgggggaaaaatcaaacaaagcaacaaccaggtatgattgttcatacgtagcaacatggctggaaacacacaccgcaagcggctgactggccactgctgcggcctcccctggaccctccctccaggctctgggcaagtggtgctcgctcttcagtgagaccccgactgcccttcagaacatctcctgtcacgctccgggcctttgctcagcttcctcattatagcacatatttatttgtttaattcctgtctctgtaagggtgaatacaaattgcgaaagaaaaataaaattttctctgatgtaaaaagagaaaaagaccccctctttctgttagagcatttccttgagaaaacatgtaattatccattcttcctctggccttttgagatgtaaatctctttaaaggctagataagcctcttgcaggttttacaacccaggaatgtttttcttacgggtctaagagccttcactttgaaatgtgaacatcaaggaaggtcgtcctcctatcttccagtctagatgagaattaaatttaggtgactagctgcaagttataactatgtccttgtcacagagatataagaagtttgttattcctttgaataacgacaattaagaagcacaaatcagccaccccaattaccaagtgaatgtaagataaactatgtgtgataaatgtgctgtcaaatccccttgcttgagggttgcatattgttgatctcgggaacacggatgtaatgggtcgtatctgcttggctacatgaaagggtgagatttcttgctgtctttgcagcttttgagcagattgccagtgacgtgcattgcattctggcttaatatttactcactgataacactgtgttctttcttttctacttttgtggaatggcttcctggcttggcaggggattttgtctttcattatatttcctcaacatctcttccttagtacagcataagatccataggctttttgtccttcttgttcacagccgtccccagcattgtgcctggcattgagtaggcattcaaaacatgtttatggaataaataaataaaccaactcccaatgtcgtttgaattttttctttaacaatgagcaagtctcacttattataataaaaaaaattgagcttttaaaaactctacaattgctaatagaacaggaactggtttgctttacagatcaggatttcatttcctgttaatccccatgcttctcagacacgagtcagtatgcttcagatcgttattagtaactacttcagacattgtcattagcagcctctgcagacatcatgcaaaataaagaataccttcagaactcacactcccagttacctaggtcctttctaagtactgagaatttatccctttctatctcaaaagcactgcagagaagattctcagaatgttcagtatcagcacctcaatcctccaataagctaccaattttcaattttcacagtgatgggttgtttttttgtttttgtttgtttgtttgtttgttttgtttttgttttttttgtttttgggattctttgtgttttttttgttttttttttttgttgttgtttttttttttttgagatggagcctcgctctgtcaccccagggctggagcaaagtggagcgaagtggccagtagcgctgccccggctcactgaagcctctgcctctcaggcttaagtgatgctcccatctcagcctcccaagtagtgaatagctggggattataggcgcctgccaccacgccagactaattttttgtatatttggtagagacggggtcccgtcatgttgtccaggctggtttcaaactcctgagctcaagcgatctgcccacctcagtctcccaaagtgctgggataacaggcatgaggcactgcgcctgggccacagtggtgtttttataagtagcatctctccctgagtggtctcatcagattggacagctcaggtcctgtgcactgcacccctgcacccatcccaaagccttccacactcttctcagaatgagtggatgaagaaaaccaaaaatggtcatagcacattctatggttagtttccagaaggcagtgtgcacaccaggccctgtaccaagcaccttaggtgcattaactcgcttaattctcacaaccaccccatgagttgggtactattaatatccccagtttacagatgagaaaacggaggctccaagatgttgagtgacttgcctagtcacatagttattggaggctaaagtggggacacactctagatggccttgaccccaaagtctcagctcttaatccaaagccataaaatgcccttagccccaaagcaaggaaacaaaaaagaaaaaactcaaccaggcaggaacctggccaagaggaatcagaatttgtctaagtcacattttctgagttcctaccaagtgccaagcattagcctacacacactaaagatgtcacccaatgcgagccacgcaacagcactgagaggtgtgtactataaccatcgtcattgcagagagggggctacgaagctgagcaagggaaagggatctactagggcatcacagtgagttagtggctaaggcagaatccaattcaggtctgtccctgtggccaatgttcttagccgcaactctcccaaagcaatgaaggaaaacacaaatgaccatccaaatcggtccaagttcaaacagggacagagctcccccaaggcaggctgcgaggagaaaggggttgtcctgaagtgggcggtggtagttatcactggtgatgttctccacaccagcttaaggggcagagtgagtcctctgtcctggcaatggagaagctcaagggttctttttgtatgccatctcgcggacaagggccaccggcctgtgttcctgctctgtcttcttttgtgcccagcgccttgcagatgctcaattaatagttgctgaattgcacactgaccacaaggaggtgaaaaaaaatttttaaaatagttgccgaacaaaggaataaatgtacatgttcccttctacaagagacctatagctggtgcttccacagtggccaactgagaagtggtctgaaggggcctggaatccaggtgtcctcctctgccctcctcctttccatgtggcctacaaggtcatttgtgtggagaaggatgaagtgggtcaaggaggaaagccttgtgagtgctgatatcctgcctgtcctgcacacatatggttgcttttaatccttgcaggaagccactgaggcatttgtcattatttgtatattacagagtaagaaatctgaggttcaaggagtttacatcatttccctctggccactcagccagtagttatgccctctggaaggcaactctgacccgtttgcctccaaagaccctgccagttaaccacagagggagaagaatgagtaggtactgcgtgatggacacaaaccacacacatgatcagcacacagcaagtatgtggtgaatgaatgaataaatgagtgaacaagaatatttcaagaagaggattactaacaggatttgttattacaaaacgtcatgaaaaatggagactggacaaagtctagtagatttgacagttaatttcaacttacagtagcaaaaaaaaaaaaaaacctgaggaaatcacctatatatccatctccaggagattagattaatcatggtgtatccatatgacaaaatgctctacagattttaaaataatgttccacaattacggttttgacaggaaacacattcgtgatctttaaaatgaaaacagtggccggacgcggtggctcacacctgtaatcccagcactttgggaggcccaggcggatggatcacttgaggtcaggagttggagaccagcctgcccaacatggggaaaccccatctctgctaaaaacacaaaaattaggcaggcgtggtggcatgtgcctgtagtcccagctacgctcaggaggctgaggcaggagaatcgcttgaacctgggaggcagaggttgcagtgagccaacatcgcaccattgcactccagcctgggcaacagagcaagactctgtcctctctcccaacttagcagcttgaaatgacatttataatctcagcttctgggagtcaggaatccaggcatggcttagctgggtgcctgtggcccagggtctctcacagggttgcaatcaaggtgttggctaggactgtggttatctcaaggctcacatggttgaggggagggttaatctgattagcagctcacctgaagcggctagcaggcctccggtccttgcgggctattgcccggaagctgctctctgttccttgccacatggggctctccatggggcagatcatggacaagagaaccaaagggggtgcccaagactggaggagccacaatcttttgtaacctcatcacagtagtggcattccatcacttttctgtattttatttatcagatgcaaagatctaggcccaaccttgacccaagagaaggagattacacaggtacatgaacaccaggagctgagagtcaccagctttaggttgcctgccagagagctctgccgggccctggatttggcattagccttgagtgggtgagagtcaatggtccccctttgaataccactgagagtccatctgagagttcaagccaagccagactccctgacttcctggtgctgattgtctgacttgggaaaatgattttctctaatgaagttttcatgttgcttctgtaagaaagaaagttgattaccactctcagccattgctcaattgcatttgtgacatggagctaattttctttgatgacacattattctctcactgccacgcaagtgtgcttctcatttgtaaaatgctgtcacctcattacttggccattagagggttttaaaagtggctttctagaaattatatttcagtttccatttcaagtaaaaacgagcttaagcatgagactttagtgatgctattttcatatgcttcttttgcctttcacctctaaaagtcttcccaagcgagctacatgtactgcctacacctcagtttgggtcagtagttctttatttcctccttacttcaccttcctctctgagtctatgttggaccagatgctgggcagctgcagaaatctcatagtattttcctacattttttccaggatgacacataaaagcccaagagccacgtggataacacacttccagatacagacaaaataagacacacacaaaattacgggatatagttcttaaccaccacagcaatagttcttaaccaccacaggcattgatcacacatcaattacagatcaattacagatgcccactacagggtgcagagagatgaaatggcacatgtgggtgttatgggcatgaagtctaattgaccagcttcgtggtgtatgagcagtcaggattttttttttttttgaaactaaattaaatcacagtcatctaatctgtaatggccaaaaattccatccctgtaccatgcaccaccctccatgggtcaagcaaagatgttggggtttcatgctggacagaagattctagaatgattctgtctggactctacaccagtaatggtggcaccaaggggtgatttgagatatgggggagctaataggtgtctattttgttattacgtatatcttaagtatacacatatgctatacattatttgtttttttaaaactgcatcataaaatgttaaaattttaagatcagttactatttcaaaacctattatcccatctaggtcctcagagtcccaccactgtgcccctcagcaggtgcccgcacacatgcatgcacacacccacgcacacacacgtgcccctgcacacccccggagattcagctctaagaagtgaataagccacttcccaccactgtccctgccttaaactggaggaacccaccccctcctgctgctcctgcttctcattccccaaaggcactgccctctctggctttctccttccaagacatctggagtattctcctcaatttgcttaaactgctgcaaaagatagcaagagggaccatctgtaagcaacttctgcttttagctccagaacacaaagaagctcaaaactgaaaacttagacaatataaaagactaggctgggcaaggtggctcacccctgtaatcccagcactttgggaggctaaggcgggaagatcgcttgaggccaggagtttgagaccagcctggccaacatggtgaaaccccgtctctactaaaaatacaaaaattagctggacatggtggcacgtgcctgtaattccagctacttgggaggctgaggcatgagaatcgcttgaatctgggaggcagaggttgcagtgagccaagattgtaccactgcaccccagcatgggtgacagaacaagaccctgtctcaaaaacaagagactaaatgactacctaacaaataaggctttttcatggcatgtgtcagtataagtcttagaactgacaagaaaaaacctttacaaatgcacgaagtatttcagcagaaatttcacagaaaaataaatccaaatggccaagaaatatacaaaaagattcaagtacataagtaatcaagtatggtagacagaataactttcccctaacaaaagatgtgcacgtcccaatccacagaaactgcgaatgtgtcatgttacaaggcaaaggaatgaaggttgcagatggaaccctgtgaccttcaaaaagttccttttggcctggcacagtggcttactcctgtaattccaacactttaggaagtcaagtcagaaggatcgcttgaggctaagagttcaagaccagcctgggcaacatagcacccatctctataaaaactaaaaaaattagcaggatatggtggcatgcgcctgtaattccagctattcaggaggctgaggcaggaggattgcttgagccttggtggttgaggttgcagtgagccatgatcatgccactgcactctagcctggacaacaaagaaagactctgtctcagaaaaaaaaaaaatagaaggacactgttaaataggcagtaaaaatcaccatgacaactcaagggagagagattacgaaaagaagaaaacagcttcatattttaataccttgaaaggcacttcttgcctgcttttttaattattattttttattttactattttattttattttgagactgggtctcactgtcgcccaggctggagtgcaggggtgtgatcatagttcactgcaatctctgcctcctgggctcaagcaatccttccacttcagcctccggagtagctgtcactataggcgctgtcacccctgagacagcaagaacaacctttcctcttccttttcctcctcagccagctcaatgcaaagatgacaaggatgaagaccttttttttttttcttaagatggagtttcactcttgttgcccaggctggagtgcagtggcacgatctcggctcaccacaacctccgcctcttgggttcaaggggcctcaacctcctcctcaacctcctgcctcaacctcctgagtagctgggattacaggcatgtaccaccacacccggctaattttttgtatttttagtagagactgagattcaccatgttggccaggcgggcctcgaacttctgacctcaggtgatcagcctgccttggccttccaaagtgctgagattacaggcgtgagccaccgcgcctggccttatatggctgcctttaatgtcagattctcaagttaagatcataaaagtcagtcctacatttctctgctaaagacaccatttagagtcggggtaaatagacactcttggccaggcgcagtggctcatgcctgtaagtccagcactttgggaggccgaggcgggcggatcacctgaggccaggagtttgagaccagcctggccaacatggtgaaaccccgtctctactaaaaatacaaaaattagccaggcgtggtggtgcactcctgaggtcccagctactcaggaggctgaggcaggaggatcacttgagcttgggagacagaggctgcagtgagctgagatcacaccactgcactccagcctgggtgacagagcaagattccatctcaaaacaaacaaacaaacaaaaaactctcatttgctgtactctgcaacctttatggagtgaaattttgccatttattcaaatttacaaatacacatatcttctcactaagcaatttcactttgaggaatttattacacaggcatacttaaacacggcaagtgacagaaatacccgctggttcatcacagcatggtttatgatcacaaggactggaaaataccctaaataccctaatggtccacccacaagggattggttaaagcattacagcaccctggaatacactggaatgctaagcagattttaagaataaggaagatttttgtgtacatattcagaaaactctaaaatataatggaagcaaaaaaagtccaggtgaagaacactgtgtatactatgccccacttgggtaaaaacagcaatgaaaaccgttcataggaatttgcctgcacacatgtaaaattttctagaaggatatgcacaagcaacgggtaacagtgtttgtctctagggagaaaaaaatgaggagaactggtcactgggataggaaggaagcttgtcattgtgtagactttttgtacctttaaaaatctgaaccgtgagaacacattatctattcatgaaaatgaagaaattaaaataaatatagttcatgcatgagctgctgctctagagagacaaagagagctgacacaataagaaaaaaacaaaactgtcacaagttcaggcaggcagcagctccaatacattttgttaaaagcaaaagtttcttcacttttagaagaagaaaaaaagaacctaaagtctataattacagtattatatttactgtcaaatttaaagggaaaaacaaaattacctttttctcttctctaataagcatatagcatgaatcacaaactcaactgcccatgaagcctgggcaggaaacttaaatgaatgaagaaggcctggtgacaagaaaatcacgggcgctttgggaggccgaggcaggaggatcacgaggtcaggagatcgagaccatcctggctaacatagtgaaaccccgtctctactaaaaatacaaaaaattagccaggcgtggtggcgggcgcctgtagtcccagctacttgggaggctgaggcaggagaatggcatgaacccgggaggctgaggttgcagtgagctgagaccgcgccactgcactccagcctgggcgacaaagcgagactccatctccaaaaaaaaaaaaaaaagaaagaaaatcatgggaaccatgaggaagtcgagatcagatgccatctggaggtggcactgtcaccgggtgacagaggggcttcaggcaaggcatctctacaacatcccagctaacgtgtgtgccctctctgtgcaccaggcactgagtgaagccctttccaagaactgtgtcaaagaattatctcaacaatctcatgggggaaactattattatcttcattttacacatgaaaagaccaaggctcagagaagttgagtcactacttccaaatcacacagctggacttctagggccaacctgacagacaatctgcacccttaagcactcttccccagcttcttgcagacacttaaatggaaggattcccatccaggggcactttaggacctccctccaacagaccctgttactttcacagctataactccatcttatgtaataaatattttttaatgcatatgtgtttaatatcatttctgtgcctgtgtaagagcttggttgagttgaattgcagttgactaatagaatattacatcttttgtaaaatatatttctttttctttttctagagagacagggtctcgctctgtcacccaggctggagtgcagtagcaccatcgtggctccctgaaacctggacctcctgagctcaagcaattctgcgtcagcctcccgagtagttgggactacaggtgcatgccaccacaccaggctaatttatttttatttttgtagtgacagggtttcgctatgttgctcaggctggtcttgaactcctgagctcaagtaatcctcccacctcagcctcccaacgtgcttggattataggcatgagccattccacccagccagaacatctttattgaagtataatttacacagcataaaattcatccatgttaagtgtacagtcccacgagttttagttacacagctgtcaccatccctacaatctgggtttaggatccttccctcaccccaagacgttcctcccactccttggcagtcaatctcatttcccactcccagccctaggccaccacggatctgttttaggtctctgtgattttgcctattctgggcacttcatgtagctggaatcctccagtgtgtgacttttgtgcctagattttttcaattggcataagagctttgagattcatttatgttgtgcatgtatcagtagtctgttccctttaattgttgcattgcgtcccattgaagacttgtgccacagtacgtcccagtttatgggcattcctaattgttgactaatatttataagatctctacaaacattggtgtcttcacattttagtctttgagtgtcgagcctttgtttctcttgagaagctaccgaggagtggagttgctgggttgtatggttagtgtatgtctaacttttcaagaaactgccacaccatctttcgctttacattcacgccaacaatctatgagggtcagaggactttttattaaacatgtactaatatcaattctcatatttattttcttctttggagctaacacgtaaacatatctataattttttttcagatttcacccatttctgcagggagaaaagctcataagccacggccctacgcccacctttgtgcccgcagaataaggaaacccgccaactacacaccacagttagaaagcccaagaccctgaaaagacctgcacccacccccaaaggggcggggctggtgggcggagaggaggcggggcgcgctccttcagccccgcccaccagccctggactccggctcccgaggagcggagctagcgggtgagccaaggggatgtgcacaggcctcctcagtcccgcccagcgcgcgcgcgcggcggcgaagccggcgggcggggccggggagggccctcgccgggtcagctccgcccaccctccccggcctccgcccgcctcccgggtcagcggcgcgggtgctgcgcctagctgcgcaccatggccgggttgctggcgttgctgggtccggcaggcagggtgggcgcccgggtccggcctcgcgccacctggctcctgggcgccaccgccccctgcgccccgccgcccctggccctggccctgctcccgcccaggctagacgcccggctgctccgcacggcgcgcggggactgccgcggccaccaggtaagcaccccaccccgaccctgatcccgggcggtgtccaggtccccagacgtccgcagggccgcgccggggtccggccgcctccgccaaggacgcctttgcacttgtagctgcccgggaccgagctcttccagggtccccgaaaccccaaatccctgcaagccaaggaagcgatcctcctagttgacagccagagaaactgaggctcgggaaggtgtggcgctctgcccaaggtcgcgcagtcttcggccgagccccgggtctgcagagcctcagccaggctggggcgcagccgactgacttggtctgaacttccacacgttgcctgcggagttgttgtccaggccttctggctgggtctcgctgtgttttgaacacctcccgacgctcgctgctcctcccttttcttctgagtggaagagcaggcgtcctcagggaagccgcgggcaagaaacccacagtgctgtttgttatgtttcatttccgtcactttccattggtgctaagtgaaaactggttttccttcagagcagtcataccagctttcctttcaagaaatctatcactttcttccaagtgagtctttttaaataaaaatagtagtaaatgaagtctggcggtccaggaatggcaagcccagacacgcggagccggcgtccagcccggagcgcatccggcctggcagtctggagcctctttgtttgcctgggtgcagacagggcccctccattcatcgcccggtgacctcagaccgagtcctgaaggcttttgagcttgttttctgacctttagagggccaaaaatagcaccttcccagcaagagtttgggagacaactccatgagctggtgcaggcctcagcggagtgccgccggcccagcgaacatctcctgaccgtttcctagcttttcagtaaggagcggatggggattggacccaggctttcatcatgcctcctgcccagatcaacttccttccttgccttctccagtccgacaggtggcacacaggtcttggggatcctctccagagtggcaccttctgcacacaccgtgccgcctcctgatgattcttcagggcccagcccagctgttccttcctccgggaagccctctctaacgacctgtgaggtctcggatgcctccactgggcctgcttccaccccatggctgtgggtcttctctgcactcatctggaatggcctcttgtcctgcctgtcagccacattgaccttgtccccagctcaggccctggcactggagcggtgtgtgtgtatacagtggcaaagagttggcctcagactccctggattcctctctctactcacttgttgttgactttgatcaaattcccttctctctatctcaggcccctcatctgtaaaatgggacgttaataattcagacttcatagaatatgaatgtaaaatgagatatgttcatacctggcatctggtgtgtcctaaattaaggttagaaatgactataattgcagtaaatatatacagtcacaaggccccagggccccgtgagctgtccttgtttcttctgcaccgtggtaaaatcggcagaaacccaagtgggatcagaacctcaaaggagattaggacaaaagataactcatctgcctgagaaaacgcgtccccagcagggcctgggagcagtgcagggagggtctgggcttggccagagcccagaacctcccctgtcgtctgttctggccgcccaccctcgtcgggaggtaggagtgtgctgcccagctgggctctccaaatttgccaggtgtttaattaagagccaaagaggcccacccacgctgccttggcagggggtctctgtaagaggggtagggaaagccacagaagagacctgcctttttgtcttaacatgattccatgtcctgtaaaccgcctagcagccccgcctgcctgtgccacttattccttccagggacgtagggggagttcaggcagatgacttgctctcccagagccccagtgtccttttgtctccgtcagttctggttccagtggcaccttttcagggagaccttccctgatggccttatttaacattcctcctactccctgtctcccgccccattggtgtttctctatggcacttgtcacaggtagcagccctggtattttactcttctgtttattgtccctgccttcccataagaccataagctcatcgagggtggggttttgtcagttttttccattgctctgtcccctacactgagaacagtgcctggcacagaggagacactcatgaatacacgaggagtaacatagcatggttgttcagagcaaaggccctggacccagactcagcgagtttggatcccagctctgacagtaatccctgtgtgatccttggtaaattactcaacctctctgggcttctcagatcctcttctgttaagtggggttgacagtagtcaaggttgttgtgaggattatatgcattaatatttcctttttttaaaattagagatgaggccgggcgcggtggctcacgcctgtaatcccagcactttgggaggccaaggtgggtggatcacctgacgtcagaagctcgagaccagcctggctaacataatgaagccccgtctctactaaaaatacaaatattagccgggcatagtggcacgtgcctgtagtcccagcttctcgggaggctgaggcaggagaatcgcttgaacccgggaggcggaggttgcagtgagccaaggtcgtatcactccactccagcctggacgacagagcacgaatctgtctcaaaaatataaaataataaaataaaagatatgttggccagcttggtcttgaacttctggcctcaagcaatcctcctacacctcagcttcccaaagtgttaggattacaagcatgagtcaccgtgcccagccaatattttcaaagtactcagaacagtgcctagtacagaatatacacaatatagtgtttattattaatatgatttctcaagtggaagaaaacaggtgtcactccaaacactgcgatcggcttggcaaggtccttggctcattctttaaaccttcctaccccctctctattacaggtttttgtactttaaaaaatgttggggagaggcagaaggggcatctcacacacacactgtctcacacacactctcacacacatgtgcatgcatgctgagtacagacagaagatgtgtcacgccgtcctgtgcattcaggacagtgcctaacacatcccgggtacttacggcaatgtttcacgaagaaatgaatgtctaaaaattttccattgcctgcaagtcacgccctcataaattcttttatttcagcttctttagtctccccaaaggttaggaagaaaaatgcgtggctcacagtgcttatagatgggtgtttttatcaaaacaaaaggaataaaattgtccagtaactgggtgttctctagaatgtcagaagccaaccgtggtgccagctaacccgagattgtccctgtgtctgaatgtcttggccctaccacagtcttgcagtagattctgctcagttctatagctggaatcctggctgcctttttatttttattttttggccaaaagtccttttgccaaaataaagactataaagaagagggccctcgcagagacagctgcagtcggtccagtgattggacagaatggggccaggtgtcaagggcatgggtgtttggccctgcgaggggctgtaggtggcctcctatcagtccccaccacctggctgctgtcccctctgcagcctccctcagcagctggaggtgggtggggcttgtttatcaggaagaaccgatgccctccacagccatcctggccgggggtggcaggactagtcagaaggcttcaaggaaacgggaggtcacatgtgctggccaaagaaaggggggctgatgacatcttccctcctcccctccagagcctggacattctggaaaagtgtcttcctttaagaatggtcattctggcaggacaggaaaggggagcctgctgagtaccacagaggctgaggcctggtggtcaccagcccagtcaccagtccatgctgccagttagccgtccctccctcctgagcctcagtcatccatctgtcaaaacaggagcgacaaaggttcctgggtcatgaggcagtgagggatttatgaaatgacgcctttgaagtggaagctcaactcctggctcagcagaagggacctgtcatcgggacactgagggttttcctcaaatgttctaaaaaatcttatgcctctaaaaataacagggtaaaagtgggccagctgcagagcccataacaagagctgacctccagccaggtgcgcatcacctgccgggacaagccccaggactgtccttagagaagtcttttgattaaagtgctctgttattgagaagtggtttttttccctcccctaatgtgggtgaggttggtatttttgtttctcccacacattccaggcttggtaggtgctcagtaactgttagcagatgtcccatgcaatccatgatttctgtacaagtcctggtagggcactgtgcaaaaatcgcccccactttgtgtgtttcagatgtcaggtgtaaatcttgattctaggagtaaatctgccatcgcttttgctgcattaattttgtgcgcaccgtccttttttgatggcatataacatggttgtcacatgctcaggctgtggccttggagggcctgggttctaatcttggtgacatcaggccaatgacctcacctcagcaagcctgtgttgctcctttgcaaagtgggaaaagcagtagtatctacctctgaaggttggcatgaggatggaaggagaaagggttggaggaccacctggctcagagaaaatgcttgataaaggatcattgtccccaagcttgtgagccctggtgttttagttactattgctgctgtaacagatgagcacataacctggtggtttaaaacaatccacatttattatcttacacttctagaggtcagaagtccaaaatgggtcttaatgcactaaagtcaaggtctcagcagagatgggtccttctaggggctcgaatccatgtcctgccttttccagcttaaagccgcttgcattccttggctcatggcccttgcctccataagccagtagcaccgcatcttcagctctctcactctgcttctgtcctcacaaccccctccccgacactgagtttcctgcctccctctcttcacttataaggacccttgtgatgacgttggtaataatgtagcccaggtaatccgggatcatctccctatctcaagacccttaatcacatctgcaaagttcttctgccatgtaaggtgacatattcacagatcctgggattgggacatctttggagtcatcattctgccagccatacctagttccaggcttgcattgcacttagtgactaagttggctcaaactcggctcactgagtaggaaaggggtaactgatccacgcctgtaatcctagcactttgggaggccaaggcgggtggatcaccaggtcaggagatcaagaccaacctggctaacacagtgaaaccccatctctactaaaaatacaaaaaattagctgggtgtggtggcacacacctgtaatcccagctacttgagaggctgaggcaaaagaatcctttgaaccagggaggtggaggttgcaatgagccacaatcatgccactgcactccagcctggatgacagagtgagactctgtctcaaaagaaaaaggaaaggggtaactgatctctcatccagcaggaaagagtataacattgcatgcgtgtataaaagccggtaatgactgcccgtgcctgccctaaagcacctcctcttctctgatttgtacacaggaccccagccaggccacggggacaacaggcagcagcgtcagctgcacagaggagaaaaagcaaagcaagtcacagcaactgaaaaagatttttcaagagtatggcactgttggcgtgtcattgcacattggaatctcattaatttccttgggcatattttacatggttgtgtcaaggtaagatttttgacagtaattaatatttgttttttactgtcatgtaagattctatgtgaataagaacgtgtttgctaagactttttttttaagacagggtctcactccactgcccaggctggagtgcagtggcatgatcacagctcactgcagtctcgacctccctgggctcaagtgatcctcccacctcagcctcccaagtagctgacactacaggcatgcaccactgcacccagctgatttgtttgtttgtttgttttgggggacggactctcgctctgttgccagactggagtgcagtggcgtgatctcggctcactgcaagctctgcctcccgggttcaagtggttctcctgcctcagcctcccgagtagctgggactacagtcgcatgccaccaagcctggctaatttttgtctttttagtagagccagggtttcaccctgttggccaggatggtctcaatctcttgacctagtgatccgccccctcggcctcccaaagtgctgagattacaggtgtgagcccccgcgtcaggccgattgtatgtttttttgttgtgttgagacaagagtcttgctatgctgcccaggctggtcttgaactcctgagctcaagcgatcctcccacctcggcctcccaaagtgctaggattacaggcgtgagccactgcacctggccactaagacttttattcattcagctacttcattacattttttaaaatactgtaaatcttatagccaaatcaatttcttcatttaatcccttgctgtaataattgttttctttgcttcttcccccctagtggtgtggacatgcctgcaatcctgctgaaactcggatttaaagagtccctggtacagtcaaaaatggcagcaggcacaagtaccttcgtggtggcctatgcaatccacaagctgtttgcgccagtgagaatcagcattacgctagtctctgtgcccttgattgtcagatattttcgaaaagtgggattttttaaacctccagctgcaaaaccttaatgaactcttcagtcgtacacactgaaaacctatttcttctaaattacatgatttggattggttttagggttttagggttgtagggtttcttttggagaggtagggggctaattgctatgttctcatggataaactttgccagcaaaaatcaggcttttgaacaattttaattttttgcctcataaattttgtgaatgctattcattatagggcttgtatatataatctaaaatgtcagcaaggcatcggagatgggttaacatctcaaaacaaaatagcctacaaatgttccttgtgggagactttggcgagggtctgtgggtaaaagcaccagggggttaatcttggctcagtttcctaaaaagcattgattaatttaactggcttttaaatatccccttccgctgatatttgttgtcagctgcctacagtttaatatgcagcgttcacaaaacagctgccagtgctacaattaatgaagcaaaacttaatatgtaatcacaatctaaattagcatcaatactttgacattcattacattggtttgggggaagaaaagtagttctggtatgtttcattgatccccagataccttccaatctggacatgatggggctgattccagatggtttttctgaaatttcattaaggtaggtcagcgtcatttgtctctgtttaggtaaaatataaaaaccctgcccagtagcagtggcatcgcttggttcctgatgcccatgttccagaggaattcggataccacaaacagctaagacaatctcagcttttcttagacaatcttctatctcaaacttcagacattccagaattgtcatgatgtttacactgtctgagttaaaaatcctgttcaagaaaaaaaaagattttgtatcacttcttaaaaaggaatattcatagcacttgtcacaaatagaaggcaaccatgagataatacaagccagggagaggcttgtattacatgacaggtgtaattagtctgctgagccagctttacccaatgaagggcatatgtgttagagagattagctaagagtagaaattcgagcatagaggccaggtgcggtggctcacgcctgtaatcccagcactttgggaggttgaggcaggcgtgtcacttgaggccaggagttcgagaccagcctggccaacatgatgaaaccccgtctctactacaaatacaaaaattagccgggtgtggtggcacacgcctgtagtcccagctactggggaggctgaggcagcattgcttgaacccaggaggtggaggttgcagtgagccaagatcacaccactgcactccagcctgggcgacagagggagacactgtctccaaaagaaagaaatcccagcgtagatccaaactgagacactgaggcttcgtccttatagtagtcaggagcaggcgattgaagtaattctgtcctgcggggttcagcatcatgcacgttccccctgggccattctctgatgcagggcacttgctccacactctgggaacccagattcaccagtctgccctgtcacgtagttgaaggagttgcatttatctttctggctcctaattcctttaaaattacatttgttgcagaacctccacaaggctaaataaaattacatttgtgaccatcagagaactgaataaaccattaactggccatcctggttttgcagagatcaggttgttgacagttcctggttgacccacagctacccatgtcagttatctccactaacatatccaagaatctttgtaggacaatttctccacctgcaaggtctttcaggtagaactcttcttttaaggcaattagcccattgccaaaaggttttactgtcttaaagctgtctttctgagatctaattccaaggacttctccacagctaagtgagatgcctcacaccattaggtgatgctttggacagaacagagtattttcatcttgtgtttaaagcaattccttggcttcggctcctcaccactttctatgccagtctcccatttatgtccctagtaatgcctatgcaaaaaaaaaaaaagaaaaaaaagaaaaactgatggtgaaacctacaggtttaagggcttaaatctcaaactttgttaggagtaacaggagcgtgctgagcgggcaagcaataaaacaaatcataccaaaaagccacattgctctctcctaagccccaaccccactccactcctgtggccaggggtccaaacagaaaataaccggagaagacaaggaggtcaaaggatcagggaactaagcattatgtgaattcaccagcaagatgtacagaacgcctgtgtttacattgtttttatggaactagcagaataaaacatctattttaaaaatgaaagccattgtttctctaatttatctgacaaagtgagcagcttaaattctgtgaaacatctttatagtttatgaacttttttatattccttctggtaagccatggttgttgctgatgatgaagtggcactgtgaccagtgtattaatgtgctactacaatgagctttttctttgcttgtgtgggattgtctggggaaacgtcccaagtctcactggtgtcactgggaaagtcagtcacgtgataataactatagcttgggagggtggcacatgaactatttgggaaggtcaaagtcagttcagctcaagactatgagaaccagaagcccctttgtcccaagggggctggcagctgcagttttactgagtcatgtttttaagtttctctatattggccactttgttatgacatatcctgacatacctgctgtccagtttcttgcactgagcattggccatgcaagcagatttctctactagctctaagttcaacacttctacttttccttcatcacagtcactttcaccgtatctttagtcgatggacagatgacaaagatatgacaaatatataaacaatatatataatgaagtattaggagtacacccaacaggagagaccagaagaggcaggactagatgagggcgagacctgctcctctcagcccctgctcatttccaggccaacaatgaacagatggtggaaagaattacacagcactccacacagacatagatacttatttatttgcatatttaaagtttacacacatgctatgactccaatgttttaaaaaaataagcccttaacagctctgagacacatggcctcttctgtatcccaagcaaatccctaaatggaggtagagcacgtgttcctatttttcacactctcatatgggagataagtggttaaggaggactagaaacccaatcaggcctaccggggtgccggacagacacacagcattcctaaaggaatgccaccagagaaaaaatacaagtctgtacatatatctttattttcatacttaaaaagaatcacatactcattccaacagctttaccaggcttcgccaacccaataagttacacactcactcaggtactaggaaggttattgcacagctccttaactgatcggggtcagggcagagtggtcactttccccacagccaggctctggatttgcctcctgtgaagacaccatgcctagcacaggctgacggggcggctgcagtcgaaccttgcctccagattatgaaccagtataagtagcacaattctcgtggctactttcacttcagagtgtcatgtttattgatgtggagctttctgaatagggaggttaaggcacacctgctgagtaaaacaaatatttcttgtgtagcgttctagattgagggcagcagtcaatggtaaaataaacttcagtagcatgttcctgtcaggttatatggcagccctggctcaaggatttctccccctgcacgattcctaagactgtttgctagctgattctttgttttggcaatttgatggttttgatgaatttgctgtgatccaggggtgttcaagtacttctctgagcattggcctctggctgggattatgcttcaacagtcttgaaatgaggtccctggctccctctgttacaaagtcagggaatgtgaattcaacctggagtacaacaaatgataaaatatcacaaaacacaggttagagagatcaaatagtatagatgttcggatcttggcctgcagttcaggctgataaggaaagaattccagcagatgtgctgggtccttttcagttgcgtcttacccgtgatattcttttgtaggtctcttggtatgtgtttgcctcaaaaggaggcttcccaactaaaaattcatagcaaagaactccaaggctccagagatccaccttctcatcatgcatccgaccttcaatcatttcagggggcaggtagtccagggtgccacagagagtggtcctcctgaaaacggagggaggctcaggttgatgtgcttctcgttttatgatcacaacagctgctaacaatcattaaagagtccactaacactgaggtcttcccctgggccagatcctgtgccctaggaagtagctactattataaattcccataggaaacagatgaagcgaggtgtgtaaggtcacacagctagccatcaggcttaaccccaaatctgtccaactccagaacctccctgaataatctagaatgtaagaaactgaatgtatcactaccatataaaagctgccatgcaaagttctctgtaaatacgatttggattctacatctgcatgtggatattacagatatgctaagaatcttaaaagcctggtcgcaatgacaatacactagaaactgtcccactgtaacagcactggggtggagatgtagacacatgctgccttgtgatagatacttggtacgagtgatgctgaaattttgagggtggcctatgaagtactcttgccaaaaatatttaacctggctgggtgcagtggctcatgcctgtaatgccagcactttgggaggccgagggaggcggatcacgaggtcaggagatcgagaccatcctggctaacatggtgaaacgccgtatctactaaaaatacaaaaaattagccgggtgtggtggtgtgcgcctgtagtcctagctactcaggaggctgaggcagaagaatggcgtgaacccgggaggcgagcttgtagtgagccaagatcgcaccactgcactccagcctgggtgacagagcgagactctgtctcaaaaaaaaaaaaaaattttcttaacctgaatctcttcaggacctgagacctacattccagttttcagcaaatacggggaataaaggtccaagttaagtggcaacacaatcagaaaagtcctctttaaagtgggagactggtctggctttagaccacagagacaatccaaccacagagacagtccaaccacagagacagtccaaccacagagacaatccaaccacatagacagtccaatacaaagcatgggctttggttgagttctgattttacaaaccagctataagatgtcatggacaataggagaaatctgaatgtggactaaatattagatactgacaatgctgttaattttcttaggagtgatcatggttctagttatataggagaatatccttatttaggaaatgcattctattatagtgcttaaggttgaagcatcatgatgtttgcaacgtattttcaagtgttcactaaaaaagcagatgcagcccttctgactaaatgggaaaaactgctgaacgtaggcactgtatagacaggtatgccatcaactaccaattccgcatttttatcggtttaggtttttttaacgaaggttggaaaaaagctgggaacagcagacagcaagccagaacagtctgtgtgggttcgtgttgctttgttatcagctgctcttcaccatggaggcttacgtggtcacagccctggtgctgtgttcagccaggcctggcacccactgagcacacaaacagtcactcaccactgaattgtgacgtaggattaagaagctaccactctggtcatctaacccctccatcagcaccgacggactgaatcgggggttctcaaactgaggcaataaccaggaaatgatgatgattaacatctgggatttggagtgaagtgactatcggttatgtaagtaatcttttcaaaaagcaagaagccatcttttctatcacaattcaaccggttaagatacagtttaactctgcgattccatgaagcctgtaagtctttattctggtttgtctcaccagataacagctcccactaatgacaaccagtttaaaaaaaaaaaaaaaaaaaaagactgcaatagcagattcagtgcattgctggaacaattagaagtgctctgtaacaaaagcaaaggttttctccctcatattctattttaggctatactttttttttaactagcttgatttttaagtcatttggctataatttgagtcctcctccaaagttgacaaaacttcatcggtagatatatgttttaaaatgccccacttcatgtgaagtttcaaagcttatttaaactcaaatttaaaacagtaaagatattgtagttcacttggaaagctaagatttgaattgttttgagactgacatctctgcttcagctgtgacaggggataagaaaggactatccctactattgacagaggcagactgaagagaatctctcaccactgccctcaaagcaccaccaaactaatttagtgtttcaagttccctgatatggcctgcactctgagctctagatctttgtcagtgctgtcctctgaaccatctccccatctcctcatccaggaagcagcagaggtgaagagttcctcccactcaacatgtgggcacttcacctctgtcatatacgtgtcctatctgttgactcattcatcccttcattagcctctaaggacattaagcatcttcaaccctaggcctagaacactgctaatagccccaaatctccacagaataacactttcttgcaaaccctagtttattattaagcctaaattactccaaagtacttctgggttagccacctacccctcttacagcacaaaatctacactgaaatattttacatttagctcacggttagctcccagggctttggtaaaccaaacaacttccacctctaaagttacatacctggaagatggagcatgtactgaccacccaaaatctgcaattttaagctctccagctgatccaagaagtaagttctctggcttaatgtctctatgaataactctcttcgaatgacagtaagacagggcatttgccaattctgttatatactgttaaaacaatattgaaagcctatgttttagattttatataacacaagttaatattagacatctcttccgaaaggaacacaacatagatttaacatggtttgcaggttttggccaggcacagtggctcacacctataatcccaacactttgggggactgaggtgggaggatcacttgagcccaggggttcaagaccagcctgggaaacatagcaagactccatctctacaaaaatttaaaaattagctgagcgtgatggtgcatgcctgtagtcccagctacttgggaggctgaggcaggaggattgcttgagaccaggaggtcaaagctgcagtgagccatgatcacacttcagcctgggtgacagaaggagaccctgtctcaaaaaggaaaagacaaaacaaaaaatacattttgcaggttttaaagcaaggattgtagaaattatataggagtctacacacacacacacacacacacacacacacacacatcaactgaaccaatttatagtggttagcatgaagtgaaattacccaatgcttagtcatctctgctaatacagctggtgtgatgttgaaagtcagaaaagacattcagccagttagagctagctcttaggctggtgccatgtcaatgcaaaacacagttacttttgcaccaacctaaagttacaacaccatacggcaacaaatggccctgcagccaggaagtaagacagtgctgaagaactggtacaaattaaggattcagatgtgtaaatactgcctttttcttttttagaaaaaaaaaatgaactttgcaagtatagtcaattcccttttttaaaaccaaggtcattctgtgacagaagaatttgtttaaagctaaaaatttacttcaagaatatcaggagaaaaaattatcctgaacaataaacagaaactaaaaagcagttgcactgacatattaaatagcatgttaaattttgggttacactaagtcagcatagaagtacataagaaatcagtccttttgttaattttatttccttaagttactatcttttttttttttaatagagatgggggtctcactatgttgaccaggctggtctcaaactcctggcctcaagtgatcctcccatctcagcctcacaacgtgctaggattacagacatgagccactgcacccgaccgaattaccatcttgtaagaaaagttttcctggccaggtgcagtggttcatacctgtaatcccagcactttgggaggccaagacaggtggatcacctgaagtcaggagttcgagaccggcctgaccaacatggtgaaaccctgtctttactaaaaatacaaaaattagccaagtgtagtggtgcatgcctataatcgcagctactcgggaggctgaggcaggagaattggttgaacccaggaggtagaggttgcagtgagccgagatcatgccattgcactccagcctgggcaacaagagtaaaattccgtctcaaaaaaaagcaagaaaaagaaaagttttacagtccctatcgctaagatttagcaaacaagtccagtatgtatgtatttacttatttatttttaagagacagggtctcactctgtcacccagcctggattgctatggcatgatcatacctcactgcagccttgaactcctggccgtaagcaatcctcccacctcagcctccttccgagtagctgggactacaggtgtgtgccaccatgcccagctaatttttaatctttcttttttttttttttttttttgtagagacagtctccccatgttgcctacgctggtcgctaattcctgacctcaagtgatcctcccaccttggcctctccaagtgctgagattacaagcgtgagctaccatgcctggcccagaatttattttaacatacagataactgtttgaatattgaaaaaatatatttagctctgcctaaagtttgagaagagtttgctttctacagcaatttctagacaggattgaacattattttacatcaaaaaggtttactaaacagatgagtaaaaaccaaatgtcactgtcagaataaacacttttcattctttcagcccaaaaccggagatcaaaattcagaccacaataaactgaaggcaaatacaaagaaagctgctcttctgaccaccaactttgagttgctgatgctttaattgcacacattaaagtttgagagggcaatggatttcactcctcaaatcacttccagacaagaagctattagtttcatgatagccctctggcactgccacttcctccacacctcacatgttgttagattgcagatatggataggtcactgacatgtcactacaattagttttatttgaattcatctgaaaaggaaaacaggtacatgtgtattcattctaactgctaaggaatctagacagaaatgatctttcattttctttcaaacagctatctgcttacaccaaaactccatctagattgaagccttgggtgtaaggagagaaaacagagaagtagtataatgtgtaattttgtagtgttggtataaggtgaatcttttaaagtaggatatcaatatcagaaactgaagaaaaagattaactgacctgaaacaacaaactacaacccaccataagcaagattaccaggaaaaaaaccaagggtaaaatgtgagtacctgaggtagagtcactaccattaatgagcatagatttacttattgatctgtaagagaaagttggcccaaaagatgaactcaaagaaatattaattgccaattaaataagaagctgatttgtttagctaatatttaaaaaagcaaattagagatctatttctacttaggagaagcacaaacatttaagattaagtctttaaaacagcatgtcattgttgcagagacaagaccaaagagccatttgtccatagtagcatgatttcatcagatactgaaagtaaaattacttgaatttaaatgccatttacatcaatgccaaaaagagaactaatgtccacactacccggagatctccaccaagaaacagaaaaaaatcaaagtaaccaccattcaacatgctttatcaagctgccaatccaataagaaacggcccaaactaagactcttcaacttcttaaaacaagtaattttaatcacataaaaaaggagaagcaaaaaagcacaatcatgaaagaaaaaactgacacatttggacttttattaaaaatacagcctgggaggccgggtacagtggctcatgcctgcaatcccaacactctgggaggccgaggtgggcaaatcacctgaggtcaggagttcaagaccagactggccaacatgatgaaaccctgtctctactaaaaatacaaaaattagctgggcgtggtggctcatgcctgtaatcccagctactcaggaggctgaggcaggagaactgcttgaacacaggaggtagaagttgcagtgagctgagaaccaagatcacgtcactgccctccagcctgggtgacaaagcaagaatgcctcaaaaaaaacaacctgggcaacatgatgagaccgtgtctatacaaaaaatacaaaaattagctgggcgtggtggtacccacctgtagtctcacctactcaggaggatcacttgagctcaacaggcagaggctgcagtgagcagagatcgcaccactgcaccccagcctggctgacagagtgaaaccctttctcaaaaaaataaataaaaaacagccttgtgaaagacacagataagagaacaaaaatacaaggcacggattgggagaaaatatttgcaaaacatgtgtgacagatgacctgcatccaaaatatacaaagaactcttaaaactcaaaactcaaaaaaaaaaagagcaaaagatttcaacaggtgcctcaaagacgatacacagatggcaaataaacacataaaaagatgttcaaggccgggcgcagtggctcacgcctataatcccagcactttgggaggccgaggcaggtggatcacaaggtcaagagatcaagaccatcctggccaacatggcgaaaccccatctctactaaaagtacaaaaattagctgggcatggtggcacgtgcctgtagtcccagctactcaggagtctgaggcaggagaatcgcttgaacccaagaggcggaggttgcagtgagccaaaatcgcaccactacactctagcctggtgacagagcgagactccgtctcaaaaaaaaaaagagacgttcaacatcaaatgtcattaggaaactagaaatcaaaacaatgagataccaccacatgccgattagaataactaaaatgcaaaacaagaggccaggtatagtggctcactcctgtaatcccaatattttgggaggcatgaattacttgagaccaggatttcgaaaccgacctgggcaacaaggcaaaaccttgtctctacaaaaaaatacaaaaattagccaggcacgagagcacatgcctgtagtcctagctacttgggaggctgagatgggaggattgcttgagccagggagtttgaggtgggtgatcatgccattgcactccagtctgggcgacagtgagaccttgtctcaaaacaaacaaacaaaaatccaaaacactgacatcaaatgttggcaactatgagaagcaagaggacctcaattcattggttccgataccacattaccgttgtataatggtatcagaattgttaaccagctgccccacggaaaccaactttatcaattagagtgcttatgtgcacttcctttggcctttgtcttatagactccactcatctccaaagctgcttggatcaacactttaccctcatgccctttagtaaggtgatttcctacatttgtaatgcaatgtaaaatataatgtaaaaatcactttggaagactgacagttcctcacaaagcaaaatatagtcttaccgtatgagctggcaatagcactcctatatatgtgcccaactaatttgaagacttgtttcgcaaaaacctgcatgcaaatgttgacagccaaaacatgataactgccaaaaaccagaagcagccaagatacccttcagtagacgaataaactgaggtacttccatataatgaaataatggaatatgattttgtgataaacagaaatgaacaagctctcatgcctccaaaaatacacagatgaatcttcaatgcatattgctaagtggaagaagcccacctaaaaaagctacatactgttatgattccaattacatgatattctggaaaaggcaatagagacagtaaacagatcagtggttgccagagatggaagggttggaagggatgagtagttgagacacaggattttttttttcttaagagcagcgaaactattctctatatcataatggtggatacatggcattgtgtatttgtcgaaattcatagaactttacagcaaacacacaaaaatcaatctcaggatatgaaaatgtaaatgattccatcctgggcatgcagattgtgacaaaaaaatctcattgcattacaaatgtaggaaaccaccttactaaagggcatgagggtaaagtgttgatccaagcagctttggaaatgagtggaatctataagacaaaggccaaaggaagtgcacataagcactctaattgataaagttggttcccacgtggcagctggttaacaattctgataccattatacatgtatattggaattgaataagtaaaaggatggtgggcggtgaaatccaggtttcacacttttggagtgggagtttacaggtaaacaggaggaagttagaatgaaacgtggtaatggattcaagttgaagacatcagtatgaattcatggtatgcttaatgaagagatagatggataaatctatacacagattactatccacatatattcccttgctgtgtcagctgaaagcctaaaagtagtgacaccatagtagcaatgagtacaccaagtgcccagagcttggtttctaataacattctccaagaaaaggaaacagggctccttggagaagtggttcgattctaggactggagcaggaaatatacacgatgaggcctgagcatcttgtatcagaaagtaaggaagtacaaggccaggcgtggtggctcacacctgtaatcctagcactttgggaggctgaggcgggcagattacctgaggtcaggggttagagaccagcctggccaacatggcaaaaccccatctctactaaaaatacaaaaatgagccgggtgtggtggtgcatgcctgttaatcctagctactcaggaggctgaggcaggagaatcgcttgaacccaggaggtgaaggctgcagtgagccaagattatgccactgcactccagcctgggcgacagagtgagattccatctcaaaaaaagaaaaaaaaaaaaaggaagtgtaaaaacaaaccaaaaaaaaaccacacacacgcaagacaaaactgcaatgattttcccaggaacctggtaaaacaaaaagagcaggccgggcacggtggctcatgcctgtaatcccagcactttgggaggctgaggtgggtggatcacaaggtcaggagttcaagaccagcctggccaatatggtgaaaccccgtctctactaaaaatacaaaaattagccaggtgtggtggtgggtgcctgtacttccagctacttgggaggctgaggcagaagaatcgcttcaacctgggaggctgaggttgcagtgagccaagatagcgccactgcactccagcctgggcgacagagtgagactccgtctcaaaaagaaaaaaaaaaaaaaagaaagaaaaaaagttcccagtggccaaagttgcaatgatctgaaccacaaaataaagtattgcattatagctcaagagataaaataaatacccaggagtctacatctttaaataaataaatgattaaataaataagggagaacagccttatctctggcacagaattccagataatttatggcaatactccatccactctctactccttaagtgtgggctattcatagtaacttcctttgaagaaatacagcacggaaaggggaaaaaatagtaactttacagtggagaaaccagacaaacactctctgagtcagaagatcaagctgacatccacagttaaaagtcataagagtttacatccctggtatgtgataagaatgcactttacctctgatctccctctcaaaaacccataagcccaatttaatcatgagaaaaactaagaaaatctgaataaaatgtggacttgagttaatagttatatatcaatattggttcattgaatgtgacaaatgtgccatattaatgcaagatgttagtaggagaattagtaggaaattcagtgtggggtatatgggaactctctgtactgccttcacaatttctgtaaatctaaaactatcctagccaggtacaatggtgtgcacctgtagtcccagctactcgggaggctgaggtggagaatcacttgagtccagcctgggcaacataacaagaccctgtccctttaaaaaaaataaaataaaataaaaattattctaaaataaaacatctattaaagaaaatgagggtgactatctatatacattatatacatttccatagaaaacagctgtgcaaactaggcacaaaagcagatacaacattctacctggttctagactttatctgtacatatggtacaactaagctattttgatttttccacttcaaatatttgatattaagctatccttacgtcaagacaaaacccactctactatgatgaaaggtacattgctatggaggacaggtataaaggaaacacaattagcctggacaataaatgaacacttacagtagcagttctctgctcatcaaactttgaaagtttctgaagttctctataaactgttccaagtggtgcatattccagaattaggtagactctggtagcatcatggaaataaccatacagtctaagaatattaggatgcctgcaacaaaggataaacattctaacacttggtttggagctcacagaagactatgtacaaaatgtcaaacaaactcttcatgtaaaaccagtggtgtttcacatgaaaccacactccaaaccccactttagaatctgaaactataaacccactccaagaaaaatacatacacccacatatcattttaaaagcacttcacagtattaatggacctctggtttagttaagactatttccttcctttaggcacctttattcttaggaggaaaattcagctgaatattaattatctacatattaaaaaaaggacatggccgggcacagtggctcacgcctgtaatcccagcactttgggaggccgaggcgggaggatcgcgaggtcaggagttcaagaccagcctggccaacatggtgaaacctcgtctctactaaaaatacaaaaattagctaggcttgttggtgcatgcctgcaatcctagctactcaggaggctgaggcaggagaatcgctttaacctgggaggcagaggttgcagtgagctgagattgcgccactgcactccagtctgggcaacagagcgagactccatctcaaaaaaaaaaaggaaaaaaaaaaaggacatggcattgccacagtagtttgacacccagacactgtgacagataaaagcagtgatcagtaatggcagtagatgggtgctgagcagactgggcaggtgcagactgtggccagcgggaagcaggcaatgggaagcacagcccatgtgagatgcctgcccctcccagccccagccaggtgttgccaggcagagacacaccaggcctgatgtggccagacttgaagtattagcatctgattcaaatttgaaaaacactgaaagaaaaaaaggaaaaacaaaaacccaccagccgtagtcaacctgcaggtagctgctcgcaattcctgcatacctcagaataaggggtgccattccccttcactgtccaccagaaagacttgcccatataaactattctattaacaaaacattaaatcctcaagtgatttttccaggatcagagcacttaagtgctctttgaaagatgacaaatttaatcattttttgtggtactatgaaaagcaggccctctaaaaaataaatttatacttaaaaaaaaaaaaaggaatacaattttattttaacatgcagagcatgggagaatcacaggagaatgcttataacccagtgcagtacagaagcttatctaatctttttcataggggagggggaggtgaggaacggggccatgcatttgaaggcagtgcctcgtaagagggagtgaagggacctgggcagtgggaggctgacattacaggagggggaggggtgcagcattggtgaacattcttttgaacatgaacctgaaaactcaccgaaggtgggactgtatttctacttctcttctgagctgatgctccactccggctttctccagctgagctttaaataacactttaagagccagaataaacttgctttgcttttctcttgccaaataaacattaccaaactttcctttacccagagggcgaccaatttcaaagtcttccaaagcccactgcctcctaggaggaatttgaacactttagaatgtgaagaaaacaaagcttttctaacaaattttcaatgagtagcagacacattctacaaataatttcgtattccaacttcactcaatatgcatcctcagcaagaaccaaggcaataaccactatcaaagagctgccacgacatgaaaccctgacgtccctagctgccgtcaggtgtgagagtcagtgacaaggagcagtctcgggttttagacctgaagcactctatgggaaatgtcccaagcccgtactatgctcagaggaacagggccatgacaacgctgaagaccacaaaaaggataagtgaccagagagggaggaatgcttccagaccatctgggggcatgtttcaaactaaccccagctgctccctccagtcccagaggtgctaattctctctgggtggagaaccactctggtggtggagacagagccactgttactaatggaagcgggatggagcccacaggctagctggggcatgagaaccagtggatttagactcttagcctctgttagaccgctaaaagcaaaagagtctgtgggttcattcctcgctcctcccggtacattctagagtccagatagttcagagactgagaggaggcttttagaaaagccctggggaagacattacagccaacctttacaataaagaactaaaactataatactgtcaaaaccctcagtcatatatgagtatatagttctgcaacatattctattttttaaaaacttgcacttttgtacaataaaaaagtacagacgcataaaccatatgtagtggttatttctaaggacagagaggaacttccacacatttctataaaagattcatacaagctttttctaaatttgaaagccattttttaaagcacttgagttcctagtaaaatacctcattacacaaaattccattttttttaagattggaaatctggaaacatttatatcctctaaatgcaaataaaggcctcatttttttccccagagttcccacaacgaaatttgcaacgaaataatatattctagtagaacagtacagaactttgtaaataagaaagcttacttttttgattcttcatttttctgttttgatgccagttcctcctcaggattattttctatatggaataagttaaaaacctgtttttagaataactatataggataagctaagctgtgaatagaggtgaatcaaagaattggtcaccaaaatattaatggtatgtcaagaatgataaatctgttttttttttttaaagttttccttatagaaaaaaaggactactacaccctgacttccatcatgtgaagcctttatagaatttctaaagatgagcagacgtatatatagacaggcccttctctgataaattaaaggcagactatgcaggctcttctgaagcctcagtttccaaagaagagcttttgtggcagaagtaccaatcttcccatgcatgacgagctgccaactcgtcacctttttccccttactaggtgggccagccaacagtccataccctacatacgaattatcaccaacatgtagcaaaacataagccagccaccctccatttatattagctgccaaggggaaatataaaaataaaagccaccaattcagcaaaatgcacaatgaacagttgtgcagcagaggactggggtaactatttcatcagccacaaggacatatgaaacatttccactggtctgtctccaacatagcaaactcgaacagcacacaatgctctgctcagatatctggatgctggtccaaactcttcctccagatgcccctgtcacatgtgcacccctcaacccccaggacactcactcaattaatatcaatctaatcaccatccctaactcctctttattcatctttcaggtacaatttattgcccagttctaatgagtctgcatcgtaaatgagctctcaaatttgtgtgcacctctccatcctggcttgtctttggataagttaactgcttctgagtcttagcttcctcctctgtaaaactgagttaataactggctaccttcatgaagtggttacgaagattgaaagagatgacgtggatgaagcacgcacttatctcagagcctgcagggaatgagcactcaacagttggtaaataattgcatccactctgctccacacagagcaggttattgccatctctgacctcaacctccttcctgtctggtactcctaaatccagcgttctactccaatttattcagtacttccacagtaaattttttttttttttttgagatagaattttgctcttgttgcccaggctagaatgcaatggcacaatctcggctcaccacaacctccacctcctgggttcaagccattctcctgcctcagcctcctgagtagctgggattacaggcgtgcaccaccacgcctggctaattttgtatttttagtagagacagggtttctccatgttggtcagactggtctccaactcctgacctcaggtgatccacctgcctcggtctcccaaagcgctgggattacaggcgtgagccactgcgcctggccttccacagtaaactttctaaaaggcagagttcccttctgagttcaaaaaagcttcagtagcttccaaatgccctagagatgaggccccattccttaacatggccagcaatgcccatggtgacctcaccgcagcctgcctcagttcacccacttctctggatttcccccacactttagatctcagtcccttcaagtcacttactgcaagcaccctacatccagactcagtaacaagcaatcaaaaggacaccaatttatgctgtgtcctccctgggtgcccaactcttccaagagggtgagaatcaggtctgtatttttagcataggtctggcccatgggcagacactgttacttcaacccagacaccatattttctccccatcctcaacagatataaaagctaaggctccaaacaataagtgcaagtatatacactggcttttttagcaacgacgacaaagaaggactatccaatgagtctcaaaagctagtttaccaggtgccgatggcaggggctgcttgctcttttgggtgttattcagtggcctggagacaggatgaggtacactggttgcctgcaattgcttctgcttctgattctgaaccggcttgtgactggagacaagcttttgtgcttgcaaaggaatgcgctgggaagaatttgaaggacacaagacccgctgagcctggccactatttacaggtaatggattctgacaaggaaattgctgagtcacgagaacacgttttggacctccaactggagctgtagcctagaatggaagagaaaataaactttctggcattcatgaaagcaaaagatgaatatattgagaatttcacaaagtttgttctctagtatagcaaaataatgaatgtcactgataagagatggaaggtgaaaaggtattttaatcagtacctccagaggatagttagtatgtggctaagaatacctgaatgataccttctatcccctccaattcctcacccctaaaaatcatgctttattaacaaatatccattaatgaaggagacactttctaaaatttctcaataatttggaaatagacactacattgctatttggcaaaaagctatgatacaaaaactttatgccaaaatctcagttccattgaaatttctttgataatatacgtttaagaaaaagaccaaaaaaaaatacgtcaaaacgttcaacagtggtattatcttcatgaagttttagaagagtctaagttttcatatatcgaagattttccacaataagcttattactgtactattgattaaccaatgtttcattttccaagtattgacaaaatggaattgagcaaaaaactgacaaagaggaaacaaatgtagacacttcacaaagttactactaaaatgtattattattattatttttgagatggagtcttgctctgtcacccagactggagtgcagtggcatgatctcggctcactgcaacctctgcctcccaggttcaagcaattctctgcctcagcctcccaagcagctgggacgacaggcgcctgccaccacgcctggctaattttttgtatttttagtagaaacagggtttcaccatcttggccaggccggtcttgaactcctgaccttgtgatccactctccttggtctcccaaagtgctgggattacaggcgtgagccaccgcgcccagccttgaaatgtattatttatacgcctgtaagtactgtattacaaccttaaattgttaagttaactctaacaccctcagctaatcaaactaaaaggggtaggagggatgagatttccttcagcttcaacagctcattgtaagtgagggacaagtgctagaaatgaaagcctcaaagtccatccccagctcaacggtatgagtgctctacaaagagagggtgttaagacttccaaatacaaagtcagttactcctgaaattagcacactgtccacaacgcagcaggcattcagacaaagacaaataaaaagaaacattttaaatatagagcaattttttaaatggccgttatcataggaacttagaatcaaatacagtaattcaaggtagcctttttctaattattttatatttatggccaattttaaaagttttgaactcctgccagatgcattattactattatcctgcatacagtggagggatatagaaacttaagcagccgattataagacaaagcagaacaaaaaagctactctaagaagcagcaaaatgttactgaacacgagaaaagtgactaattcatatccaggatcacagtaagggatctaaatttaaatccaaagtaaaggcggaaagaattcccgacaagaccaacctccatgtgggtttataaatgtgaatgagattacagattattcaatttaccttaacaggtcctgaaatgcagttttctttagatcggtccatgatgcctgaaaagaaaaagaagaacctttaatttgaacaaagccacctgcttaaagtgctgttgctcgataggcagcgttacagttccccaatcaaaaggcctccacaacacaccggattttacatgttttgtccaaatgaagctaatgagggagggacaggcatgtgctttccctgcaaggccaacctccccttgggcactgcgtcccatcctctgtcacggagtcttcactcctgatggtcttgctgctccatcatctctcctctaatggatcacttccatccctgtgcagcctactggcatacctgctaccttaaaaaagtcctctttaggccgggcatggtggcttacacctgtaatcccagcattttgggaggccgaggtgggcggatcacctgaggtcaagagttcgagaccagcctggccaacatggtgaaaccccgtctctactaaaaatacaaaacttagctgagcgtggtggcagtcacctgtaatcccagctactcgggaggctgaggcaggagaatcacttaaacccaggaagcagaggttgcagtgagctgagatcacaccattgcactccagcctatgggaaaagagcgagacttcgtctcaaaacaataaaataaaataaaagtcctctttattctattatcgttgctaacaatgaccccctcctctccaacagcaaagctccagaagaaccgtccacacttgccacctctactgctcctctcccctcccctgagcccatccccacctggcttttttgtctccaccacattgtcaggctcatggctgacacctactgctgccaaacccaagggtcaattccaccttccccgtacttgcatcctcagcagaatctgacaaggttgatcacatcttacacttttttcttcacttcacttccaggtttatctaccacctagtcgtcctgtctttccctccttgctgggtcagtctcatttttgccagatcaagggtctggggtgactcaagaacgagtccctggaccctccacttctccatctacaccttcaccagggatccatatcacccagtgcctcagctctaaatgccttcatgaggaccactcaaagtgcgtcttctgccctagtctctccttggactgtcagacttggatatccaaggatttgcccaggatctcccaaaaatgtctgccaggcacctcaatcctaacatatccaaaactgaacctcttcccttctccacttctcacctccctgttcatgggtgtgccctgagctcaggcctagaatgacttctccatctccaattactccctagccgagtacatccagtctctttgctttcagtaccatctacaggctgaggactcccaaatattcattcttcagcccagacctctcccctgaactcttgatctacattttctactttctatgcaacatctgcacctgattatctgagcggcatctccattctaacatgtcccaaacagaagtcctaatctctccccactctcacctccccaaatctagtctctagacatcctcatctcagtgcatggcaaacccatcctgtcagttgctcaggccaaaagccttggcataataaccctttacgaggttctctctcgcaaacccttcatttaatccaccagcatattctgtaggctctgccttcaagatcactgctcaccacctctactactaccacctggtcaaaccattattctctctcccttgagttttttccaacagcctcccaatggcctccccacttccacccttaccctgtcatggtccattcttaacactgaggccggcaatctcattaacaaatcagatgtgttgatcctcagttcagaagacccccatggctcccaactcaatcaaaacaatgcaaactcctaacctgcatagacaggcctattgaagtctcacagaacatggaccctaactacctctctgacttcatctcctcttcttgtcaaccgtgtaccagccacacaaggctttctttctgcaaataagtcccctgccataagcatttgcacttcttgctccctttattacgcttttcccccaggtgtgtagttcagtctttcatttcactgaggtttctttttttttttttttgagatagagtttgctcttgttgcccaggctggagtgcaatggcgcaatctcggctcacccgcaacctccacctcctgggttcaagcaattctcctgcctcagcctccagagtagctgggattacagacatgcaccaccacgcccagctgattttgtatttttagtagagacagggtttctctatgttggtagggctggtctggaactcccgacctcaggtgatccacccacctcggcctccgaaaatgctgggattacgggcatgagccaccgcgcccggccttcactgaagtttcttatcaaatatccccgcactctggcctgggcaatggagtgagaccctgtctcaaaaaaaaaaattaagattaccattttacaattaagcaaataattccatgatgaagccaggcccagactacaggctgcagcccttataaaaaaacagtgggtaagtaaaagttgataaacagcaacaaggaaatgcacacttgtgttaatcaaatatttaatttcacacatgctctaatgctttacttcccttacaattctaagtagcagtctaatgagatcacataggcctaacaacatttattcaacattcttctgacagaagctacaggcatttgctccaatttattctacctttctttctagggaaattgaataacaagcagaatggaataagattctaatccagaattctggagacaacgccaaggagactgcccttcaggtgactctaatctgcaaccagattgaagaaccagatgactttcacaggatccattcagttcaaaccagaagtcctactattttgaatagaaaagctgttaggctaatagcgcaggaggtttatacggtttattccttcctccctcagacctgtgcatgtctgcagagatgaagggaaggacgaactgagtaggttgctgaaaaacgtttaattcaagggacaaggaaggttacggaagaggaagagacattacgagagttaaggacagtggctacgtctacctcagccggatggttcttagaaatggagactctgaggcctaaccccaggtctaaaaaaacagattctgcattttaacgtccccagacgatttgtatgcaccggtctgcatccctagttctcaatgaaacctaagaatcatctggagagtttgttaataactagacacctgggtcctacccctcagagattctgatttaccgggctctcggtggagctatatgtttaacaagcactgcaagttatcccggtacaactgctccaaggtctacggtctgagaagtacggaccgggaaggcctctgcaaggaggttctcattcatcaattcacccactcatccagccaggacaagggccttcttaggctattctatctaaagcggcccccgttaaaccgcactcctgcttttcctctgtaacacccaccccagctgcaagttctccgtacgcttaccgtctgtctccccacccactagaacgtgaactccaacacagcagagaccttctgtgcttttcttacccaggtgatctcggaggacaaaatccaatctgaagcccacccacccctcccgcgcatgtcaacaccactcaacaaaccccttgtacctctagctgtaataagtaacaagcagtatcctacagggcgcctcggtgcccaggagcggatgcaaaggcgctgggcgggcacaaggcagcgccaaggacactcagggacggaggaaccgacaggggacttgacgctccgccactccgaccagccgccccttgtccccgccgtcctcgtccgccactgagatatcccccacggtctacccacccgtcggctcccacctgcgacccaaggacccaagtcttccaagagctcagccgttagaattcaaaggttcttctttttaaataggagttaaaccctctagctagaaagccgattggcctgcgctcgagcgaggctgccttgtgattggttgacaacaaacccgacgccttgagtcgcgtttaagggcgcacaccgcgcgcaggcgcacttgctccctaagaacccggaagtggtggagccaacggccagccagacctgtggcagtcccagccccagggtgctctccgcggtcggccatttatcggtgaagcaacagccccttgacgtcaagcttgacgcattggagataaagtccaaggaggtgaactaacctttgaacgtgccagtaagtaagatggcgagaaaagcaagagagagtgggaccgatcgatagcgcagcggtcggcttggcgccctttcagcgtgcgcagtgaacgtgcgctcggagcggtagattgggcaggattcgcgcctccatttttccaggagagagcgggataccaagagaaccggaccagctggtactgggacacggggagagtagctggtgcggtcggctggggcatttagagaaaaccacagaaacgactggggcgagactggaagagtcgagagttagcaaggtggcatgcgcctctactttgcgtttcctaagttgcccggcttggcctgcaccccttcctcttctcgaagggcctcgcttccattcccacccagtccttagttcgcctctgcatccagatggtcgcggcgcatatagtgagggggcatctgtgttctagcctttccaactgcgatgtatccggtcctggatcgggttcttgtcctcgtgtgctcacctgcaaattggggataattaggcttctgtttacctggcgagtgaacgttctgtgggagttgagaagttaggggtgggccacttaaaatatatatatatatacacacacacacacatatacatatatatacacacacatatgtgtgtgtgtgtgtgtgtatgtacacccgggatgtgctcagcagaagtgaagagaccggatagaacagtggtgtaggggaaccaaaaatggcttccctccatccttccaggtaccttattaggactaagagttaaattcacataagacgaattaacagattactgcagggtaaacaggatgtgcatgtaaagcattgagctagcatacggaaattattcgagtcatattaacccaacgttaacagtagaatctctcatcaacttttctttgccagactacccacttgtgattttcattctttattggtacttaagaatctcccatttttttcgggtaactgaacattgtccatgggagaaaaacgatatttaattacgtacaggagtcccacaaaatacgagactaaaagttgaagtcagatgattaaagcctacatggcatcctgagctactgaaaggaatgaatagagaattgggggcggggggcgggaagcagctctaacacaagttatgggacggtgaacggaggaaatgtatggtgaatcaagtttgttatgcagacagaataggtgatcttctgggtggtgtcagcctctaatctctcatgtgatccgagttaatcttccctggtttataaggattcgtgacaattgaggtatttttggagggtcagactttaggcaggtaaggaaagcacagggaaagcctcttcccgcctgctgttctccaggtgccctcagttcaaggtaatcagcccgccaaagcatcttgttttgggctggcatttcctgaactccttcagtggttaagctcagggatctggagttggcaattctggtgtgctttaaccttggacaagtaactcagccactttttacgttgagtaggtgtcctgacctccttgaacccatttcatcatctttatttgtgtcccaggattttctactcaagcatagacctactatgttcatgtactacttcatatacttgaatacattgaatgattttattcagtgaactgatgcttacaaagtacttagcatgacggtatctggcatgcaggaagtgcttaatgttattggttattattaacaccatcagtgtcatacagtgtgtaagaaatcaggctctgggccaggcgcagtggctcgcgcccgtaatcccagcactttgggaggcggaggcaggcagatcacctgaggtcaggagtttcgagaccagcctggccaatatggtgaaaccccgtctctactaaaaatacaaaaattagcctggtgtggtggcgggcgcctgtagtcttagctactcgggaggctgagacaggagaatagcttgaacccaggaggcggaggttgcagtgagccgagatcgcgccactgccctcaagcctgggcgacagagcgagactccgtctcaaaaagaaaaaagaaatcaggctctgaggtcacttttattctttattgctgtccccagacacctgtagccttttaatcttggtccaaacatacacatacataaaggcattgatttttggtaagcaaattatcatgttgaacagttggagttcttttttgaataagccagaaaccatttacagttttttgtctcttaagactgaaggaaaacttagacacttgtaagtcagtgcatgcacaatccttcccgattattactgttttttttttcatttttattgttttgaccttgattggcaatattttattgggcagctcacctttgagcctttctaacgcatttaactcggttggagtttttgtagtacagttgcttttttttgcttcatattttgatttactgtctaattagattatataattacagtaacaagctcagttgccttaaaacaggttttgagaatgagcataaaagattagtaaacatacagctcagctagtggaaccagcagtctagatcttgacaaaatagcagctatcttgcatattgcaggtaccagtcaatgtttaattaacagaagtaatggaagattctgggataacaataaagaacaaaaatcataggtagctagtttggtggagaagaaaagttggtgagagattgtaccgtaaacactggctaacatgacttgaacaatttctgtatgccaggcactgtgctcagggctttatatgcaccaccgtgtttaacttccagtaacttaacagctgaagaacctcaggcttagagaaatgaggtcactgaccaaagataatgcagctagtagagatgggatttgagtcctgcaagattaagtctgaccaaagagtcctatgttgcttctgtgatttactagagcctgtacccttcaccgtccattttccgtttttgcagctggcagggaaactgtcttccttttctccaagatgtacagaaccaaagtgggcttgaaggaccgccagcagctctacaagctgatcattagccagctgctatatgacggctacatcagcatcgccaatggcctcatcaatgaaatcaagcctcagtctgtgtgtgcaccctcggagcagctcctgcatctcatcaaactcggtagattgtgaacacaaatccatacgtcccatggcaaggttttagatattttcatatggcagaatttttcaagattattcttgttttgtttcagtacctagtatgagccgggtacttcagtaagtaagtagttcagcatgagttcaggaagtagctcagtaagtaaggggtaaagcaaagttcagattatgaagaccttaagctggttctggcctgagggtctttgtacacattatctggaacactctgtcagacatattactgacttccttcagattttacatcaaatgtcatctgagttctcttaactcctcctaaaataatccgaccctttcgtgcattttcccggttaccctgccatagcgatcccatttgttttataacagttgttttgaaatttcctttatcatttgggctgtttcccatgggatccttacctccacacttcccacctactgctgcccccttgtcaaaaaagactacaagttgagtaaggatcaggaccttgtattattcagcagtatatcctggagcctacctggctaataatagaaagcactcaataaaatattgaattaccaaacatgttaataccctttgacttggcagtgccaattgtgagcatttctcctggggaaataaaatggacaaactgcaatgccaacaacatggaattagctgtaaatttttaaatatccataaaagtgaatactataacataattatatagatgaatatttattagccaagatacacttttgttctgcttgattaagtgaacaagtgagtcacaacatgttacacagcattgctctattactgttttgaaaaataaaacagccgtgcacggggaaggatccctaagaatttataccgatacgttaacagttattatctctgggtggtaaaattcaaggtcatttttattttcttgttcatccatagtgttaatttttcctctactaatcaacatattatttgatttgtcaagttatttataaattttaaatgcatattcttgataaaccagttttttttaaataactttatttcaaaaacatttcactagcattcatgttaacaatgtagctaacttaacgagcatcagagctgctaatatatctcaaccctaaaaatattaaaatttggaatggaaaaaaatggataatttaactacagaactgctattttttgagtttctgtagttgtagataaagtagtaaactctggaggcaagaacctggggaaatgactttgtctattggagcctaaccttccagcaacccatgtggcctcacagcgtggtgaactttgaatagcatgggcaaaatacacagttttgtaaagtgttaggtgtcacgcggctccaagaaataggaggttgacactggtgagcatctttccagtttggatctagaattttatcttggcctttttaagaaaaaacacttgttttgttacgcccttaattttgatttctttcaggaatggaaaacgatgacaccgcagttcagtatgcaattggtcgttcagatactgttgcccctggcacagggattgacctggaatttgatgcagatgttcagactatgtccccagaggcttctgagtacgaaacatgctatgtcacatcacataaaggaccatgccgtgtagctacctatagtagagatggacagttaatagctactgggtctgctgatgcttcgataaagatacttgacacagagaggatgttggccaaaagtgccatgccaatagaggtaaaaattccagtcacatacttattgattgccttctgtttttcatttttggaaaaatgagagtatggttgaaaccagctttagtttgctacagttgtggattgtgcacttggattcagacacattctgtgccttgagcatctcttcttgttggtctaggtcatgatgaatgagaccgcacaacaaaatatggaaaaccacccagtgattcgaactctttatgaccatgtggatgaagtcacgtgccttgctttccacccaacagaacagatcctggcttctggttcaagggattatactcttaaattatttgattattccaaaccatcagcaaaaagagccttcaaatacattcaggtaggaatctttagaaaggagctttacattttttcttaaatacaatgagctattgtacaactattctctttttaaaagtagtctcagtgatcatcctgtaagatgcgtacagaccaggatgcatgcccgatggcacatggatcagattttgttggcacatagatcacatgctatcatgtacctgctccctctggctggtcagagtttataatctgaccctttggagggtttggaatccatatcactctctaaaggttgtagatccctgttataaacaaaacacgaccagcttcactaatatataacttagaggaataaaaaaaaagttcatttgaaagtattaagtatttcctggcaaggtgacattcggtaccctattttgaatatgcattgcagaaatactaatgttttagttgtggcttctgtctgtttgataattaaactaggctggttgcagtggctcatgtctgtaatcccagcactttgagaagccaaagtgggaggatcacttgagcccagaagtttatggtcagcctgagcaatgtagtgagacctcatctctacaaaaaattcttttaatcagctgggcatggtggcacgcgccgatagtcccagctactcaggaggcggaggcaaggatgatcatttgagcccaagaggttgagcctgcagtgagctgtgaccatgccgctgcactccagcctgggcgacagagcaagaccctgtctgaaaaaaataataataaacttaatttttcactcaatatttgcagccctagagcaaattaaagaagctcttaggtacaagttgtacttcagttaaccatgcatgaatgtgtcattgtctgataatactccatccttagtttactcagtgttcatttgtaaataatgaagctcacttctgtagtttttggaataatataaccagtaaatatttagttttggaaatctattcaaaaaatactttcatatgttccagaaagcactttttttcttatgatacctgtgtaatatctaataattgttttatagattcttttcatcagccagatattttccacatttcctctggatttaattgttcaccagttggtcacttgtattaatgtctctgtcccaacaggaagctgaaatgttacgttccatctcttttcatccttctggagactttatacttgtcggaactcagcatcctactcttcgcctttatgatatcaacacctttcaatgttttgtctcttgcaatcctcaagatcaacacaccgatgctatatgttccgttaattacaattctagtgccaatatgtacgtaactggaagcaaggacggctgcatcaaattatgggatggtgtttcaaatcgatgcatcacaacttttgagaaagcacatgacggtgctgaagtttgttctgccattttttccaaaaattctaaatacattctctcaagtggaaaagactctgtagctaaactttgggaaatatcaacgggacgaacactggtcagatacacgggtatgtgagacgttgatgttacttaacatttctgtagtgtttacactttccagaactctcttttaagacctcacaatagagcaacacaatatctatgcattgagcaaggcagatgttaccctttcttagataagaggaaaccaagacttacaggttaagtcatttagccaaggctacacgacttggaaatagaacggtgctttctttgctcttctgagcacctcacaccgtggactagggctggattccatgcaagtaacatttgagaacctggtgatccatttgtagactggcatgccctcttcccacagaaatgtgaaagcaatccagagaaaagtttccaatagtagatctcagtattattaatatatgtattcatgaaagaatggctgagagggaagatcttatcccattcctaagagagcagacctagcccgcaaaggaaaccacgttaattctgaatgcagatataaagtaggctcagcagacagaaaaaaattgcatccactgaattctcatttatgtatgttggtctcattggtaacagtagtgcctgtggagtctttttataatgaaatccatttaaatttatcctatcactagtagggcccaagtctggttatttgataatgaatgttaaaacactgtcttctgttccttgtagcagcaaagactgttgtttggtagaaaacctccagaaaatttctgattgtttcttccattgtgagatatgtttgtatcatacactaaaattggcatgagcataactcaaaaaaaatcacaagaaaacagtattggaagggactggattgtgtttaagtttgcattgaagagtcagtgacatctgacccactagggggcagcataacttgccttagatttgtctcattgtaaccaaagttcccttccccagccatctttctggcttctggtaccactagcaaatcttaggaagagccatttttatcataattcttggtgacttcattgaaacacttgtataaagttgttctgaaaagtatttattataaagaactactttataatagttgtgtttgttgcaaaaagaagataaaaaagtgatcagggtaaatgtgaaagtactccccctatagaagttataactgttttaaggagtgtgctgtatctggacagatacacaccagcctactgacaatagcttatatatttgctctaggaatgttttgggtgttttataatagtatgaggttgattggcttgttttagtggggaatagcagtgtggtttttcaaaaatgtgattatgctgaatttatgcacagattccccttttccttttttctcatttcacaggtcaagcgcctgtcatgtcagcatgttaagatttctgttcccagttttaataattagttagaatttgggccaggcgcggtggctcacacctgtaatcccagcactttgggaggccgaggtgggcagatcacaaggtcaggagtttgagaccagcctggccaatatggtgaaaccccgtctctatgaaaaatacaaaaattagctgggcttggtggcgggcgcctgtagtcccagctacttgggaggctgaggcaggagaatagcttgaacctgggaggtggaggttgcagtgagccgagattgcgctgctgtactccagcctgggcgacagagtaagactccgtctcaaaaaatgataataataataattagttagaattcagagggtttttgaaatgatgaaaaaggaaaaactatcaaaactttagaaattgggatgcaaaaaattaaaaacaatataaataacatacaggactgggagaaaatggttatagcatatatacagatgttagacattgagttaacatccttaatctataaagagaactcatatgggaaaaagatgagtccaaactcgagaaaaaaggagccaaaggacagggggctgcagaagagaaaaatggtcaggaaatgtaagaaaaggtggccagccttgctgcagacccaagaaatgaatatggggacctggttttgttaatcagatttcaggagtcttaaagatttatattatctactattgatagagatttcgggaaatcatattttgttggtcagagtcagctggtaaaatatttcagcacagtttggtgtcatatcaaaattttaaatacacgctttttgacccactatatctactcttagaaattcaacctaaagaggtaattggacagacatgcacatgcccataaaaggatgtgtgtcccaacatcatttggagtggctgaaagttagaaacagcataaatgtccaataagaagcactgaggaaatctgttacgcatccatggacaacatacacctttaaaaataagtatgcatgctaacatgggctgagcactcgcactccagagcctcctttgcattctcttattcttaatcctcacagccttatggggtaggttctgtaactactccatggaacagatgagaaaattaaggctgaggaatgttaagtaatttgcccagggtcacattagtgttgaacccacatctgaccacacagactttgtgtttttatccactaagctgtattctgtctttacagatctgcactacatatgcttgaatattaatagtatatgacaaatgctctgacttaaagaagttacaaatgaagccagggactgtggctcacacctattatcccagcactttgggaggccaaggtgggcagatcatctgaggtcaggagtttgagaccagcctggccaacatggtgaaaccccatctctactaaaaatacaaaaattagttgagtgtggtggcacatgcctgtaatcccagctactcaggaggctgaggcaggagaatctcttgaacccaggaggcagaggttgcagtgagccgagatcacaccattgcactccagcctgggcaacagagtaagactctatctcaaaaaaaaaaaaaaaagagagaatttacaagtgagcacataacacttagatatttcgaaagagtattcaccaaagtattgactgttacctctgatgggtgcaattattaggcagtttttattttcctttttatactttatttggtacttttaaacataaaatatgtaatttatagtcataaaaaggcttccttttggaaagtagatattcatatactttgtctcagtaattctgtctctaggaatttactcctaaggaaataaagctttctgtacaaaggatgttcattacaacattacttataattgatataaactaaatgtcaggaagtaaaagaattgttaaacaggccgggcatggtggctcacacctgtaatcccagcactttgggaggccgaagcaggtggatcacaaggtcaggagataaagaccatcctggccaacctggtgaaaccctgtctttactaaaaatacaaaaattggctgggtgtggtggtgtccacctgtagtcccagctacttgggaggctgaggcgggagaatcactcgaacccaggaggcggaggttgcagtgagccgagatcacgccactgcactccagcctggcgacagagtgagactctgtctaaaaaaaaaaaaaaaagatcacacacaaaagaattgttaaataagtaatggggcttctaaacatgaggcactttgcatctagtaaaaaacatggaaaaatgtactcagcataaagttggttaaaactataatagaaaaatatagtggcaacaattttatatgtatttttaaaatgtgtttttttatgcctcaaagtacattaggacagtaacagtattgcttcaggtgatctggtgatctcctttttttttttcctgatgcagtcttgctcttgctctgttgcctgttgcccagactggtcttgaactcctgggctcaagcagccctccttcctcagcctcccaaagtactgggattacagacgtgagccactgtgcctggtttgattttcttttttgtacttttttagagtttctgaaagtgtacaaggtgtatcactgcaacaggtttaaaatgcttttacattgaatgctagaacgttctgagggtctaagatgtggacttagaaagctatccctcttgctctctgtggcaggcgcgggtttaagtggacgccaggtgcaccggacacaggctgtgtttaaccacaccgaggactatgtgttgctgcccgacgagaggacgatcagtctttgctgctgggactcgaggacagccgagcggagaaacctgctgtcgttggggcacaacaatattgtacgctgcatagtgcactcccccaccaaccccgggttcatgacgtgcagcgatgacttcagagcgcggttttggtaccggagatcgaccactgactgagccaccctctccgtagggttctttctcgaggactctaccctcctcccccacgtcctgtctcagctgcagtcgtaagtccgtgcaccatccttgacgttttgctgccacctctgtccacattcttcttggatttgtataaaagaatctttttttaccttgatgtagaatcatggtggaaaaagttggaaacacagatctgtgcagttctacattcactgattattacagtgtgattttcatcggttttgtaagtacaggacttgccgtttcttttgatctcttgattgaaggaggatagggcattaaagtgcttttgacatgaggaattttcatttggttcttctgtcaactttcttgcttattctgctgaaccctctgtgtatttcccttccaggtatatttgaacagataagcaggcatgcagctctgagactcctgagttttatgccattatcaaaagcattttcaagaatccctcaattctatcctgaaatgatgttattctgataataaagctcagatctgcaactttattgttatatatttttcacttctgtaaaattaatggccagtttttcctgacaatttataggaacagtatctttcaacatactccctacattatccttcaatatctgcaatacttgtctttagtaactgtatttctggtaagattatgatttcatgagaaacaattgaaaatatatccgatctaattaaattaggtcagcctgctattgctctcaggtgttgcctgtcttcacgaatgattagtatcgattgacctctttcttaggtggttttaagtcttcagttctcgtcagcatgaactaacttctcatcatggaggcacatagtaactgcattctcagaagatttatgcagttaaccaattgatacaagttttctttttcttgaatttttttttttttaattgaggcacagtcttgctctgtcacccaggttggagtgcagtggcgtgatctcagctcactgcaagctccgcctcctggtttcacaccattttcctgcctcagcctcccaagtagctgggactacaggcacccaccaccacgcccggctaattttttttttttttttttttttttttgtatttttagtagagccagggtttcaccatgttagccaggatggtctctatctcctgacctcgtgatccgcctgcctcagcctcccaaagttttgggattacaggcgtgagccaccgcgcccagccttcctgaagctttttagaacatgacagtacttctctggattcagcactagcagagtcagagaactctgaactccccttgtacaaacataaactttgctttatatttatcccaaaaaacaaataccttatgatctgcataggagtacctagaaatataatctgggatcatttgataaaaatagtaaatagattgaagtaaaagtcattgctttatattataggaagttttgttttgttttgttttgtttgttttgtttttgagacggagtttcgctcttgtcccccaggctttagtgcaatggcgcgatctcggctcaccgcagcctccgccacctgggttcaaacgattctcctgcctcaggctcccgagtaactaggattacaggcgtgcgccaccatgcccggctaattttgtattttttttagtagagacggggtttctccatgttggtcaggctggtctcgaactcccaacctcaggtaatccgcccgcctcagcctcccaaagtgctaggattacaggcgtgagccaccacgcgcggccccatcatacgaagttactgaagttattgcgtaaacattctgttttagtcatccttgaggatcgttttaactccttgatctgtaaaactgtcttaagcatcttaacatgttacatcacagggttttagctcagatttccaaagagccatattttttgatgcatatttccagttgaattccagtgtgaatttccagttgtactttgcattctgattctttgatatttgaacttggccatctgtgggtgctactctcgtaagactaaaaggcacctactaaatacgaacaaggataaccagttctaccaaaaacattaccaaccaaacctcccctgttcttttttcagactttccttttgctttcaacctcttaaactgtaaaggagagatttaatgtttccctattattctgctttgactcacatactaaaatgaccacatggcactccattgaatcttttcagttgttcacgaattaaaataatgcccatgttttacagtttttcgagtagtctcagcaatggatctgtagtttcaggacctgtttttaaaagatcaagatacttttatgtgtttcagaagtagctgttttttcattttttgtgggtttgttttttttgtgtttgtttggttggttggtttttggtttttttgctttttaaaggtcacagtgttgtgagcctggtgtaaatgccaggaatattatatggacttagtatctgcatctcgttaattgtaccacacaacactctgccattcaaataatgaatatctggtcaggatacgaacttataccctctgtgtgttttttttttttaagatacgtgatttctgaaataaactttatatacaatgataagctagtttattttttttggaacttactttgaacatttcccacatttgaacatctgttctcaaacagcagttatgactttggtactgttcaccctttctttagtgctttgttccagaagtcaggtttttatagctggatcacctttagctctttatctttgctcctctgctctctatgaatttttctttttttgaaacgaattctcaccctgccgcccaggctggagtgcaatggcgcgatctcggttcaccgcaacctccgcctcccaggttcaagcgattctcctgccttagccccctgagtagctgagattacaggcgcgtgccaccatgcctggctaattttttctatctttaggagagacagggtttcgccatgttggccaggctggtcttgaactcctgaccttctgatctgcccaccttggcctcccaaagtgctgggattacagacgtgagccaccgtgcccggccgctctctgtgaagttaaagaacttgagtataattcagttttttggcttattcagagaacgctatctttgcttacactttggttttccttaggaagagcaatgtgagagagtccagtctcagctctgttactgacttggtaagtaatagggcaagtcatttttctgggatacagcttccttttctgcgattaaagggcttaatgaaaaaaatctccagcatgcacttcaacctgtaaagctctttgttttcatgcctgatgatacaaacagacttcagggagggaggaagccattgttcctaagcgggagacatctgtttctaaaaaggtaacaaaccagatatttccagagccctttcaattcaaacctggatagaactttttttaaatctctaatagttagctgagacagcaagaaagaaggaattcctgaggggcagaacaaagcacaaatccagaggattcgcagtgctggagcactgagtaggtcagttcctgtaacctactcatctctgagcagaagtcaaagctctgagtcttcatggaggaggaactttggtcaagacccagaaagcctggaaccccaaaggtgccccttcagtaaaaggatgaacttgacaaaaacctgcctcagagaaagacgagaaatctgcctgcttggtgctggctcaggggttttcggagagagggtgtctggtgttggcacaagggagggtctcctgagaattcggtccacgcactgttcctcatgcaggtttggaacaatttacgctacctgtactgctcagagaaaatcaaatggggatcttaaagcagtctccaactgatggtggccacaagtatctggcagaggccagcacgaattttctgtgcaagaacacgtcttaaccccagtcctccctctatcccagataaacctctgaggatcatgaactcacagtcaggtacgtgaggaaacaagccaccctgataagaatcagcaaaaataacataatcagacttgcaaggacctagtggaattaccagacacagattaaattcagagaactaaaacagtaactaaaatgggaccaaggggcgggcgtggtggctcacgcctggaattccacactttggaaggccgaggctgtgagatggcttgaggtcaggagttcgagaccagcctgggcaatagggcaaaacctcatctctaccaaaaatacaaaaatattagccgggtgtagtggcgcacacttgtagtcccagctactcaggaagctgaggcatgagaatcgcttgagccagggagatggaggttgcagtgagccaggatcaagccactgcactgcagcttgggcaacagagcgagcctctgtatcaaaataaaaatgggaccaaggattaaaaaacttgcacaaggccaggcgccgtggctcacacctgtaatctcagaactttgggaggctgagaccggcggatcacctgaggccaggagttcaagaccagcctgaccaacatggagaaaccccatctctactaaaaatacaaaaacattagccgggtgtggtggcacatgcctgtaatcccagctactcaggaggctgaggcaggagcatcgcttgaacccgggaggcagaggttgcgatgagccgagatcgcaccattgcacttcagcctgggcaacaagagcgagactccatctaaaaaaaaaaaaaaaaaaacttgcacaagggactgggcaggtttgaattaaagaataagacttgtggaaaacctcctattggaatgtttctctagttttcatcgtgaattgctttggcctttccctggagctcttaactgttggccttcctgctccctgactggatatttgactctatgaagcctctttcacaggcgtcttttggccaagcaactcctcgccactctgtctgctccccagtaacgaccgcttgcctggggcatcattttctctctggctttttcttgctctcctgccggcattcagcctttccctccagcttcctgtccccactctgtccccagagcatttcctttgcatccttgttttcaattcttgccctaattccttttccctcccaacctgggggtcaaaacttgggtgataaaactaatcactaataactagagtggctgcagattccccagccctcccagtattatccctgcagcagaatatttggtgaatttgtgggcaattcatgaaattcttttttttcttttttctttaagacagtctcactctcgcccaggctggagtgcagcggtgcgatctccactctactgcagcctccacctcccgggttcaaatgattcttgtgcctcagcctcccaagtagctgggattataggcatgcaccaccacgctcggccaatttttgtattttttgtagagatggggcttcgccatgttagccaggcctggcctcaaatgatctgcctgcctcagcctcccaaagttctgggattacagacctgagctgtcttgcccagccaattcatgaaattctgctttggtcaaaagagctatttttatgagtaatcttcatgagattacagcctgaaacttcccgccaagcctttaatgttttgaacattgtaagtctggtgttcagctgtcctttataattcaaatatcgagtgcccagtgtttcactactaccagtcagggagcttgatattcacatgaaaacaacataaaagcatacagaaaaacatgcaaaagcaattttcctccctacgcatgtataaggcactatagaagtgaattggtcagactcacttgtctcagaaaagaaaattcggtccaaactactgttcttgatagcacatttgccaagagcattaagattacctcactagagtccttctgacgtagttcccttgaactccagctgtttcagccttcagacaaccggatattatgcaagcacccagtttcctagactaatagttcttgcaatgtttgtccacattaaaggctcatttgccttaaaatactaatggattgcagcaaaatgtctaaggcagtttctcacacctttcattcagaaaaaccatagagggctcaaataacagaccgagaggtcaagttccttattcacaaaatatcaaactaggtatctatgtaggagctagttgatataatttcagggccaaagcctattacttttgtgtcttacttttctagttgaggttgttttccctagaaaaaacaacttgtgaattatagcattctgatctgtattatgagcttaagggcaggctcttcagtatagggaagaatcactgccgggagtctgccaagttgatggaaaccatctgaacttgagttactgtggagtcttttctaagagacttgaattcagtttctgggtctgttactttactctgtgaccttgggcaagtttatccatccttccttttcattacagagaatttcagacataaaagtcaacaatacagcagaaacagtggtttccaggggctgggggaagaacaagtaactgctaatggggtaaatgtccaggaattgaaagaggattactttttgaaatggtggttgcacaactctgaatgtactaaaaaccactgaattgtatacttcaaaaaggtgcattggccaggtgcggtggctcacacctataatcccagcactttgggaggctaaggcaggtgaatgacgaggtcaggagatcaagaccatcctggccaacatggtgaaaccctgtctctactaaaatacaaaaaaattagccgggcatggtggcacgcacctataatcccagctacttgggaggctgaggcaggagaatctcttgaaacctggaggtggaggttgcagtgagccgagattacaccactgcactccagcctggtgacagagcaagactccgtctcaaaaaaaataaataaataaaggtgaattttatggtacctgaattatatcttaatataatattaatatattattattaatataatttatatcttaatatctctatggatctcctccttgaaccaaactgttcattgcgtggggtcattgttccctccctgttatctgctatcgcctgcagcatgccaattacttggccctgaagttaatttctaacaatgataacatttaaaaatgtggactgtctcagccagaaatcagtcagctacttcaatgggtaaatacatcctggtgcccagacttgtggggacgacacatgggacaaccagaggacaagacgctaagtgctatctgttgaacttgcctcagaggtgtggtaaaagaaaagaaaatttaaaaataaaaaattaaaaaatgctgtctgacaagaagatagcggtaagctatcccccacagctggttggggatagaacttgagcctggcttggaagaatgggcaccattttgtctaaataaaaatgcaggccggggccaggcgttgtggctcacgcctgtaatcccagcattttgagaggctgaggtgggtggatcacttgaggtcaggagtttgagaccagcctggccaacatggtgaagtcctgtctctactgaaaatacaaaaattagccaggcgtggtggcgggtgcctgtaatcccagctgctctggaggctgaggcaggagaatcacttgaacccgggaggtggaggttgcagtgagccgagattgcgccactgcgctcccacctgagtgacagagaaagactccgtctcaaaaaaaaaaaaaaatgcagacttattttgctcagtgtctgctatgctgtaggtcctctctagagattggatctgaatttaggaaaagtaaaaagagttggcaagtgatgataaactgcatgagctagcaggggtttcaagtacaacacacacgataagtttatttgatttaagagagagaatacaggtgcggggctcagcatagccctcagtgcagagccagtacccagaagatgttattcattaggtaccatgagcaaagaccaggagatgagcatggggttccgagcagggtgaatgcacaactgacagggtgggtagagtggagactgtgtcctttaaggcagcctgtttgactgcttttatcctggctgtcataaggcaagttttagggagcaggaaggaagaaatgctgaccgctatcagaaatttggcctagtggcctctcatcagggaaatgagcttggtctgttcggttggagttgttccacagagttcaaaggacaagaatgctgtgtgttcatacactgagctcttcgaagtaggaacttcgccctataaagcagaagagtggtgtttttttcttcttcttcttcttttgtggtttcacatagcaaatgagtgacagtctctacttacagacaaagtgagacgtcaggcattgagacgtgagtgtggcttgtatttctggtcctcccctgcttcactgctttcattttactcttatcgtgctttccagaaagtttgcctgctgggagagtctttttgatcgtttcccatgtgttgtcagatagctccatagaattcagtttctgagaaccagccagaagcatgcagtgacattgcacaatctgcctctgaagctggagatactagctgcagagctcaggggagctgctccacatcaccgacatgaagggaacaggcatcatggactgtgcgcccaaggtgagtgatgtggggctgtttgaatgggctctggcggggagcaagctgtgatgattaagggtgttgaccagctttagttgtgactttctaataaaggttgaataccagtgacgtgtgagttggagatgggaaagtttaacataagtttaagtgtgggaaatagatgtgttgtaaagctccttaccagtttgcatccaagatgggtgaaaatgactttgtagtagaaatcagcttacttggttgacagcgccgtccatcattttgcgtccagcaaactcctgaagcaagatgcgagtctgcctcagcccccgctaattccttctttctctggaccccaaagacactcagtgccactctaactgtcctatttggtttctgtgctcacctcccaacagcagagcccagacccttgcctgcagcctcccgtgctgagcccacagtgggcacttacatgttattttcatgttaacttgtgcattatgtgagcaaagctggagctttcagacagacttcatgcctgtcatgaatcaaaaaagattcactatttagaaaggtgaaagaagccaggcacggtggtacatacctgtactccagctaccggagaggctgaggtgagaagattaattcagcccagaagtttgagtccagcctgggcaacatagcgagaccccatcttaaaaaaaaaaaaaagaaaagaaaagttaaaatggctaccatattaaaaaaaaatttacccagacataaagaaagtgaagctcaaggttgtgttttcatcttgctatgccctttttaaattttaagtagaacaggaaaaaagaaatgaaacaagcagtaaatggggagcttgcttataaaaatcaatgcttatttttcattataataaaagtgactagtgtggctgtctgcggtggctcacacctgtaatcccagcactttgggaggccaaggcaggtggatcacttgaggccaggagtttgagaccagcctgatcaacatgaaaaaaccccatatctaccaaaaatacaacaattagctgagcgtggtggcgcatgcccgtgatcccagctactcgggaggctgaggcacaagaatcgcttgagcctgggaggcagaggttgcagtgagctgagattataccactgcattccggcctgggtgacagagcaagactctgtctcaaaaaaaaaaaaaaaaaaaaaaaaaaagtcactagtggaatttgtgactgagtaacccatgacagtctctcttgtatagattatatgtaaatatcttagctaccctagaattttgtccccaactacttactttgaaaaatttcaaaccattggaaaaatatgggaagcgtgggggttattcagtaaatccctgcatatccttcacctagatcattggtttctggtactttgtcatatttgtgtgcatttatttgtgtatatttagacactggaacacacttcatttttattgttgttgttaaactctttgaaaataaatggccaatacaatgacgctccacccctaaacttcattatgtgtctcctaagaacaaggacattcatctacagaacgtagaagaatatctacatatcatcatacccaagaacatttcacatttatttaataatgcctttctactattcagtctaattcacgttgatttaataatgccattctactattcagtccacattcacattttccaaaattatcctttttagcttttctggctgttgttgtttgtgtgtgtgtttgtctttctgatccaggtggtgtttgtcaattctcagttcttaatctagaacaatctactacctttttctctttcataacattgaccttttttctaaacagcctagattttttatgatttagacttctttttatgtactgcttattctgcctaaataatttatgtagcgctttacaattgggtggggttttgttatttaaaaaaaatatttttagcaatgggggtatcactctgttgtccaagctggactcaaattcctgaactcaggtgattcttctgcctcagcctcccaagtacaggattacaggtgcacaccaccgagccccactgcaatttgtaaataacatgcatgtttgcatagaacatataattgatattcccagcatccccatgaaattctgctattaatattatacagataggccgggagcggtggctcatgcctgtaatcccaccactttcagaggctgaagcgtgtggatcacctgaggtcaggggattagcctggccaaaatggtgaaaccccatctctagtaaaaatacaaaaaaattagctgggcatagtggtgcacgtctgtattcccagctactcgggaggctgaggcaggagaattgctttatatatatatataaatagtagccaacccttaccgattgtctacatgtgaggccctgtgctgagtgctctacttgcattttctcactattacatcctcacaacatcctcatgaagcagaggtattattcccctgtcacagacgaggaaacgaggcctcgctgacttgcccaaggccatacagctagtaggtggcaatgccaggaatcaaccccaggcagactaagctcagagctccattcttagctcattatattctctcccttgtaccaggggttggcaaactcttcataaagagtcagatagtattttatgctttgcaggccaaatacaatctctgttgcatatggttgtttgtttatgcagtccttaagatatgtacagtcattcttcacttatgggtcatccatctagatttggtccacaggcccttgtgtagcagcctatgtcatctcagtttacgtaggccacccccacccacccacgcagtaccaggaaacacccaagttgtcgacacctagttcagaggcatcctcagttaactgtttcttgggtgtccctacagaaactatcaatgcatctataagatacatgttttaaggttttacacaaataggagctgtaagtaaagatctgttgagcttcttgcctttagcaactaccaatacgtactggtgttcagttcatattagtgcagttgatccatctcattaatcttaatgcctacattgttgctcaattgctttataaatggtagcacaatgcttcaaggggtcatgtcatgtcagtggtccttagctttggggcattcgcctttaaaacaaccctgcctttcattcagggccaccgcagatagcctttcagaccctgaagttcgcctttgtacatcgtatggtaaacagggactgttctcgcaagctgttcctaattctacctgctggccagtagctccgttgccagtagagctgctttcacctttgtgcatggcagattttgtgtaatatccagactgatttattctattttttaaaaattgttttatagaacaaggcgaaatttttttaaaacacgtgatattagtgataggaaacactggcctcaaaggtggtaaatttaacacctcattcattggtttgtggaactctagccaactagtcaactccattcaagaaatactagaaatttagttttcgtgggtttttttgaggtggagtttcactctgtcgtccaggctggagtgcagtggcatgatcttggctcactgcaacctccacctcccaggttaaagcaattctcctgcctcagcctcccaagtagctgggattacaggcatgtgccaccatgctcagctaatttctgtatttttagtagagacgggttttcaccatattggccaggctggtctcgaactcctgacctcaagttatctgcctgtctcagcctcccaaagtgctgggattacaggcgtgagccactgcgcccagccagaaatttagttctaaaagaactaaaattgtctaaaagacaaggaggataagtgggcttattatacgtaagttcttattttggatttttggtagtttcaagatgccttagttacgaaaatagagtctgcaatgtactttagtgattcagtcctgtttgctataaattctgtttacttccgtgtgtgtgtgtgtgtgtgtgtgtgtgtgtatgcacacatgccattacaggtaatattgaaattagcatcttcatacacagcccttttttccccaataacatgattttctcactggagtaaatgtccaggaattgaaagaggattttactgaatgaaataagctttggcacttattttccatcattttctgagaatttctgatatttgattctattttaaacctactttccccagtattttctctacaatctgtactttcttttataaagacagctatgtgctcattcagttttctgaaggcatttttcaagcaagcatctttactatgttactgaagagtggatggtccaatatttatactgtaagaacatttaaatgtgattatctttcacattttaaattcagcctcaattaaagagcaaatcttttttgtctctctcccatctcaactctgagtggcatggttttggacccactcaagaaggatcaaggtaaaaatgtagaattttttaaaaaatcttccacatctcaaggttggtttaaacacgacaaaatgtgttggcttggaagtgtgtaccacttgctgggacttggcttgcttcagtgcttctgggcaagaaagcctggtgaggcttcgtttgtgagtggagagcagttttaggttctctttgtacctttagcagctctgaggtggtgagcaagacatttcaaactcagtctttgttgaagggcaaatgggattgtgtgcagaaagctgacctggcccttcagggcccattagatcccactccgagcagctctcctgcctcagttccttccccttctcccctgctgttccccgccttggattcttctctctctagcaagcatcgcctcacccagaggcctctctggaccacgctgtgcaaatcacttcccccctacacaggcccaccgccaacactctcatctatcttaccttcacttattaagatctgaaattatctcactttgtttgttcctctgtcttcctctctgggaacgaaactccatgagggacagacctgggctttcttactcagtgctgcatctccggtgcctacaacagtgcctgcacaaagtagttgctcaatacatgctttgtggtagtgtgtgaacgaatgggagcttacagggagtgcaggtggagccctggctgcagccccgctgtgaggataggaacagcactactttctagtcagcaggtgtttggcaacggaggtcattcctgactctcagctctctaacccctacctggcgtcagcctaagctgccactcagcctgttctcttgacaattgtccccctccttgtccatggtcagatgttgccttagatgcaagctgttgctattgaaatcaaggtcacaaagacctgtagcctccctccagcatttcccagcaacttcctcccttcatctattccacgaggcaaaacagcccagacacaacacccaactcgaaaacacagctcaccatccatgcctcagccattcacccaatgcatagttattgggctccgggggttcagggtgatcaagacagagctgacattccaatggagtgagcatgacagtgagtaaatagacccatggtttcaggtggtgagaactgccagaaagaggagaaaacagggggatctgatggaggcgatggatggaaaaggccactctgaacacccaagagatgggaaaagctttccaggaagagggaacagcagatgccaagggcctgcagtgggaaggtattcagcatagtacagggcccctgtaaagacccatggggtcaaagaagagtaaaccaagagagagaggggtcagaagtgagatctgaggtgtaagcaggataacatagggcctggtcggccgtgtaagagctttgaagccattctaattgcaaaggaaaccaccagcccacttaaagcaggagatgacatgatctaatttatgttttctagatcactcaggctgctgtgcaacagatgggctgtaagtaggaaagagcaaaagctggtaaacgtggagacttcagtgtaggtggcttcattttccactggggtggtaccctgctcttctccatggacacgaaggagaatcgtgtactctgtctttaaaaaagtagaacttttgatgtttgagaccgctggtcgccgtgtcgggtggggagtggttgtgagcagaaaaaatagtaaatcaaggagtagatagcttctatttatgtgtgttacgtttgattcaggaacacaatgtacctttcattccgtcaacaaatattgaatgcctgctgcacaccaggcactgttctaaatgcttccaagtccaagtgcctggtcccctttctccatatgtagtaaataattattatgactaataaaaaatccatcacatactcattattggttcccctgtttaatcacctgtagtctttgaacattttatttcctatagagcacacttggggggaaaaaaagctaaggagaatgccaccatcaccccaaaacttaaaaggtctgagaatagacaggcattggccgacacgataatggaatggggaagcaactgtagaatcaaaacagggccgttttggaattgcgatgactaagggaggaaatgacaggggcctgaaggggaaatagcttaaaaggaggaaggtgggaggctggtaagagagctgccacggagggggagattagaacactccaacttgagttgcaaaaaaaggaaatacattttttaggaaccatttccaaacataacgcctatgaagtgtttgttcaggggaagagcagccttgtacacacacctacgaaaagcatagtcgacactgagaagactgagaagaatatgcgtggcctcttgttcctgggaaagcatccccagctctcagtgtgggagatcctgcacttcccccacaccacccccgctcaggctggagtacagtggcacaatctcagctcagtgcaacctcagcctcctggcttaagtgatcctcccacctcagcctcccaagtagctggggcttcaggcatgcaccactgtgcccggctaatttttgtatttttagtagaggtgggttttttttcaccatgttgcccaggctggtctcgaactcctgtttttaagtgattggcccacctcagcttcccaaagtgctgggattacaggcgtgagccaccgtgcccggctaggctctgcactcttaaaactcctctaggaggccaggcacagtggctcatgcctgtaatcccagcactttgggaggccaaggcaggtggatcatctgaggtcgggagttcaataccagcctgaccaacatggagaaaccccatctctactaaaaacacaaaaattagctgggcttggtggtgcacgcctgtaatcccaaatactcaggagactgaggcaggagaatcgcttgaacccaggaggcggaggttgtggtgagccgaaatcacgccattgcactccagcctgggcaacaagagcgaaaactccatctcaaaaacaaacaaacaaaagaaagctcctctaggagatgagtgtggactgtgaaaaagttattcacaggcaatttgaggccacctacctggccactcagagagtttctccacgagtttatgttagtgaatgtattgttcttttcctttgaacaactgcttcaccttatcatcaagagcagcttttgtttgctctacatgttctggacagcccaggcagtctgtcttttgtggggttagggagggacagggggcaaaagagcagtagggtcatccctgtgtcttggaggtgtttgccatctggttaacagtaagtgaaaagtgctttgtggaatgttcactttgggttcagaaattttcttttagagacagggtctcactttgtcacccagactggagtgcagtggcgttatcatagttcactacaacctcaaactcctgggctcaagcaatcctcctgcctcagcctcccaagtagctgagactactggtgcacgccaccatgcccatctaatttttttttttttttttgtagagatgaggggctctccctatattgcccaggcttgtctcgaactcctgacctcaagcagtcctcctgcctcagcctcctaaagcactgagattacaggagtgagccaccacacccggcccaggttcaaaagtgagagtctccccacggttgaaaggggaatagaagcacaagagtcagtaatcaataacaaacaactcaaggtgctccttccttacactggtgttccccaaagtgaggtgaattgccagccactgggagtcagggccagttacataagacattctcggtaagccccctttgggtatcccaaataaggactggggtgggtttatgtgtagtccattattaacaactaaacgaacaaacctagtgaattgcaataaattcacaccaacagaacaaaagaagaaaagcttaaacaaaagagtggctccttgctttcctgaagcacctctaaaaatgaccatagaaagatggaaaagtttggtgaacaagcctgaaccttcactcatttctctgtcatgcattaaacagcttgagccagctttgaattcttccgggtcaatcaaatggaagtgccctgactgcaggcatgccagaggatttcaagtgtggtgcacagaacagtttttgtacaatactggtgtatcttgatttgcattcaaacaaactaaaactagctcatcaaacctgtaatttcatgggtaacatcgctgagggacagttgttttttaattgactcaatttgttattttacctaaaaaattgtagtggcacgtggatatgacaggaagcaggcagttgctagacacaaaaccctttagaaacacaggctgggggctgggtgtggtagtccacgcctgtaatcccagcactttgggaggctgcagtgggaggatcgcttgagcccagctgttggagaccagcctgggcaacatagcgagactatctctacaaaaaatttttaaaagtagctgggtttggtggctcatgcctgtagtcctagctacttgaaaggctgaggtgggaggatcgttcgagcccaggagttcgaggctgcagtgagctgtgatcgcgtcactgcagtccagcctgggtgacaaagtgagaccctgtctctagaaaagaaaagagaaaaagaaacacaggcttagacaaagttttcttctaattggtgtcggcataattgcttacgacccatcaaataacacaaaactccttctttctttatgcctttcctcacttttttccttaaaaaaagaaaaaaggaaagagggaaggaaaggaaaggaagttagagagaaaagcacctgcatgttattttctctgtaatccctcagatggctttcatgaactaagaggtaagagtaagagaagaattcatgggaaatgtagattttgcagctggatgggaactttggcgattgccctgggaagctatctcactttcaggtgaagaaactgaaacccagagaagttctgttacttgcctcctccttcggtgggtttttcatgagcaagggtgaaattgtcagccccttgacttgatccaacagttccccaaaccaaatatcttaagcaataactcagggacttagctggcaaggaatagacttggcggtggcaggcagtggcaaggctgtgaatgaacacactacgatctctggagcactttgagttggagaatgcagtctggtatgacatgggcccatcttgggccacatccatgataatcaattatgtgaaggcctgagagacctttattgttgcatcatttcaatcctgagcttagatcaaggaaaccagtcacctgttcccccggtgtatattgtcagacatacagtaggtgcttgataaataattgccaattcaatgaagccttaagtgcagcttagcaaggtttccatgagtagaggaagtatattaaagcatgtcgatctgggtaacacccaaacctgctggaaaagcacagtattcaggtatcagggaagcaaatgtttcatttccactgggtggctttggaatttttttctggccacaacctcctcctcaaagccccgttagtaggcagtgcctcctacagctgcggaagttcctttaatgtgtggctttttcatctgaatcatcaggaagaattcaaagctggctgggtcagagttcaatgttatcatggagaaccagttaaagtttgcgtttattcacagcatgtgccattctccacgattatttttagaggtcttaagaaaataaggaactctcttttcattaaagtttttctttttctctcatatccctcctcatatccaagttcacccggttcattcacttctttgtccctggtttctctggataaaccggccacaaaggctatttgcatccatttggatgggagggaaccaatgggagtgtgggagagaatgcgttatgtaaccagcccatccttccccatggctggggtggcaggaagggcagtgagcctcccccaggagcttagagacccactggccagatccacaggcaaggacagctgcagagaaagtttagacccagacctcacagcattcctgcacaaactcctacagaaagatttcccttcccaagcgacttctgctggtgttttccaggatatggatagtactttttaaaatagtttctttaaaggatcaagatgaaggtgaatgtgagtatctgagtttctgtcttctgacatccatttcctacaactctttgattgtgtgggactctgagttgactatataaaggggtccagagcttgttatttccaatgctccccactatattaaggaagtaggtaatgatggtttccaaatgactgtcacaccatgggaaacaattgaaagttgcatcaggttttgaaaccaaaaagggagaccttatatttttgtttagaaagttatattctattctattaagttttgttttaaagcttaaacattactttattttatttatttatttatttattgagatggagtgttgctctgttgcccaggctggaatgcagtggcgcaatctcagctcactgcaacctccacctcccaagttcaagcaattatcctgtctcagcctccccagtagttgggactacaggcatgcaccaccatgcccggctaatttttgtatttttagtagagtcggggtttcaccatgttggccaggctggtcttgaactcctgacctcaagtgatccgcacacctcggcgtcccaaagtgttgggattacagacatgagccactgcgcctggccttaaatgttacttaaatataagagtagttggaaaaagggagtttcaattcacacttccagttaagtaactttcagatcattttctgcacattctggagcttttcattcaataattttcacctttttcaaaaacggggctgaagcagaaactcagttcttttcctagcctatttggcaaattaatattaatcacaaaaaaaggcagcagtttcccttcagcatctctcacttaactactttgctaagttttttttaaacagctccaagagaaacaactgtcctttatgtgagatgatgcaagaaactacttagctatcacctcattaaaagaattcaaaatatttctgataatgagatgcagattattgaagcaaagctgtctcaagtttaacaacctcataaactaattctctcacacattaggcatgacaaattaaagagatagtttaatctacctgcaaattcttaaagcaagttctggttatgaaatataccattttgctattttaagtgacaattcctcataacttaaggaattttacttttaaatgtaaatattgatatggaaagccactgcaattcatgggggaaaagaaaagttaagatacagcttcggccaggcatggtggctcacgcctgtaatcctagcactttgggaggtcaaggcgggtggatcatctgaggtcaggagttcgagaccagcctggccaacatggggaaaccccgtctctactaaaaatacaaaaatttgccgggtgtggtggcatgcacctgtagtcccagctactcgggaagctgaggcaggagaattgcttgatcccaggtggcagaggttgcagtgagcagagatcgcaccactgcattccagcctggatgacagagcgagactctgtctcaaaaaaaaaaaaaaaaaaaaaaatcacaggttctttcttgggtaactatgtcaaaggggaaggaggcacaagggacaaagagaagacaggaatgagctggcaaaaatggagggaggaagggagagagaaatgaatgttagatgagggaggaggtggctggttgcctggtgctcccttctcaactgcagacctcacagcacaacttcaggagttgtaggaggttttccaggaggaaagtagggacatggttattctgaatgttttccccaacatcacacacatgcaacatgcagctactgtgtcctgatactgcatatcctaactttggccttggggaacatgtcccatcatgggaggccctcctctctggcctgggtctttgtacacagtactcagatcattctgcagctggccaaaggagagttcaaggatcactgggatagcaggaagggcagcgagcctcccccaggagctttgagatcctctcagtgcctcctcaacttgcctggaccaggccagacaaatctttaaaacactttgagtctaaacttctgtgactcttaatgcacctgcagttagatcccatttaacagtcattcgttgccctctctgtgtggttccactctgtggccctactctcaaggaagaggtaaatgctcacaaaatcagctagttctcagaaaccactcaagcacctttcagcatcctccatgctgtacacggtccaggccctttgagggatggccagtgagaagtagttgacgatgtttggcatcctggaagttcagggaggtaagaagtcttcctgcatgtggcaaactgcttttggccaagattaagatggactcaaagtcaaaattcctttctatctaatctaggagtagaaagggcttgcgtggtaacgacaagcagctgcttaaattcaccagcgcaggagtcctcttcttccaatagaacagaatcctttgtaaattagatttttatattgaaaaagaatatttacacatggttttaggaattccaactgtacaaatgaacatggactcaaagtgtttttatctaatcccaaacctctaactccccagacccctgtttcctacccagaagggaccctcagtgagtgacataatcttccagaaagatgctatacttataaaagcatcaatgcagacctatgctcatcttgctctttttaaaaaatttaatactacattttggagattgtcccgtttccattgacataagctctacctcattcttgtaatggctacattgtactccattatacaaatgtctccgtttctcagcttcatctccctctcccaggaggcactttgccatcttgtatctgctaagatgtccacaccgtcttgtgatagagtctgtgctaagcagagtggtttgtaggctaaaagagcacactccagacccaaaactgcctgcattccagtcctggcgttggcccttgatcgctgaactaccttaagctactttctcaccctctctgtgccttggcttactcatctcctaaatgagatgttagttatagtacctgcttcataaggtttttgaatatcaaatgcggtcatcagtgctgactgcttatcccagtgcctgacacagagttgagaacccgcgagctatcctgattcccgaggcgttggctaaacagtggacaagactgacacagttcctgcgtagttagagtgcgacagacactcctttcagggcgaacagaatggttttgtgaggggctacattgaatctaaaagattaaagaggatttttccctcttcttcttcttcttttttttcccccttcttcttcttctttccgcctccccctcccccgccaagacaaggtctcactctgtcttccaggctggagagcagtggcacaatcccggctcattgcaatctccacctagcccatgttcaagccatcctccagcctcagcctcccaagtagctgggattacaggcatgtgccaccatgcccagataatttttatatttttggtagagatgaggtttcaccatgtttcccaggctggtctcaaactcctgagttcaaagtgatctgctcacctcagcctcccaaagtgctgggattacaggcatgagccaccgcacccagccagcttctcccccttatttggttagttataggaaaataatactagctgacacacacagtgtgtgagaagtctgtattgttatgtggggtttgcaaagtgaggacactttccagatcatctttgctgtaactccctaagctaggcatggtgatgtgtgcctgtagtcccagctacctgtgaggctgaggcaggaggattgcttaagaccaggagtttaaggctgtagtgcaccatgatcatgcctgtgaatagccactgcattccagcctgggcaacatagcaagaccctgtctcttaaaaaaaaaaaaaaaaaaaccctctgtcacccttctggaggtgacttcacagaatgttgttacccaccagaaatccctcccagaagaagtgtctgtagatactttgatttttcctcaggttgtccttcctccttctctgtcttccctttttggagaatgtaggtgggaaaaatgtaggtggtgaggggatttttcttacgctcttggaaacttttttttaacataatatccttttaaaatgatggaaagtaaacattcacaagccaacagataatacccttctctctgcattaatctttcctagcctgtatttgaatttacatgaaatgaaatacttccaagtacatttgaagggagactatttacttgaaagatgatcaaagagccctttctccattctgcactctctcgatgttgagtctgggcacagctacctcataaaaatgtataacagaatatgtcactgatctcaacataaaagctcctacatccatggaaatccttcatgaacttcagggattcacatttcccatgtatcaaaagatctgtgatatttatagtatatgcagtttttaaaatgtggtttctctataactaactatcctttcctggccctcaaaggggaagtaggaagcattccatcacctcgcctgaatagtaactaagaattcttggaagtaagacatggaatcagtgagaaggaagccgaaatgcgaaacatggacatttttcaaagaaggatcttagtagaagaaaaatgtccttcttggccttggagatctacatctttgtacagagcaggggcctagacatcacttacagctctggcttcttgcacagttaccatctccaccactagtttggggaacttccttatttaccacctcccactatggactggtgacctcactgtatgatttaccttcccaaagaaagaatgatattctaggttacttggatggaaacggtctcatgatctctactttactatcccatagttactactgttttaattttaggagcataagtgtttggtgtcaggcgggctgtgaaagataaaacaaggaggaagcaggatggggccatgatgctgccctgacccctgtgacaggaaagagagaaggagctggacagagtagagacagcctcaaactgtggggcagcttagacatagtcttgacaactcaacaggggctttggggtaaagattgcccattcagtgagtcctgcattgggcaggaacacccaggccccctgactattaacgttgagtttgcaaaggaaatctggatggggtctctaagacctcagctgcgggctggactcagcagcagaatgcttcactgggcccaaggagtgatattttaagatctgcctgagcatgccacagcctccaccacacccaaatgtcttacgcctggcctgtctcactcatgtatatttcttgcccagctcctataatcctttgagtttgctgcttctccttacagctgtctttaaaccagctctttctggatttgcacacatttggatgtaagagttagcagattagagtaggaaacagacttggacttggaaaggccgtgcagagtattggcaatagcaggcttcagtcagatggatgcgagtttgaatccctgctctgctacctgctgctgcatgaccagaggcaggtcattaatctctcctagtcttaggtgccacaaagcactaaaatgaggccaacagagcaatcagtgtaccccccgacctgccccccagccctgacattcttgagtttctgcagctttgctcttttgagtaaactaaagagaaagaaaattgaaggtaaagcagagaagcaagctgtgcatgtgggcgagtgcacgtgggtgcagtcacccgggcagtgtgtccaccccggcctagagaggggatttccatcccaggaacagggacaatgaggcagcataactgaggctgcaggagctgcttctctcccggctcatctaagctgctcctgcctagagctgccatgcctgcggatgtctcttataccaccatggatgatgaaagtgtgcgggccagttccctctcttcttcttactttccctggcccattcagcagtgcgtccctcccttctctgcagttatgctcctgctcttcttccaagcatcacctcaagttgcatccagtccttcaccagctcctccccaaaactaacaaaatccagcctctgccctcagccaagccacaggcatctcccagctggaccagacaattgactttgaatcgcctctctggcttccacttgctccatgcaccccattttccacccagtaaccacctataaacagcatccgctatggaaattaggagccagggcctttgttgatctctctccaggcaacctggtcatttttcagttcctccaactttccatgcgcccccaacacatacatacacactcactcatactcacacacgccccctcacccacgcactccggcctccacacattcctcttcctctgcctgaatgctctttatctgactaacactttatctgactaactccttatctaactcctccttacccccagatggaagcttccatggctgctttctcaggtaaacgtccctaagccctcacccatcactacttcccaactgcacttataatttttcataacttcctgtattttttcataacttcctgtattttttataacttcctgtattttatttctcataacttcttgtattttctttccatctcacttacaagagatggaaaccctgtatttatttctgtgatgatttgattagaatttgtctcctccactaacatgtacatggcatgagatcagaaacagttttgttcaccacgatgcctccagcagagcccctggaatacacgtgatgctcaatacaatcttggtgaatgaatgaatgaatgaattgctccccagatttctccaagtgcagctaagaccactgtatccttggctgctcgggtttagatgagcacattgcacctgccagctgtggaaaggtctctgcactgaggttatcatcagcatgaaggcagtgagtctcttattcttcacgtttgtttccctatcctcctcctgttcttccttccaaatgcatattcattttccttttccctctcccagctgttgtatgaagatgggcatttgggggaaatgtcctttttggaaatcgtttaagaacatttcttccattgtacccagaatctaactgcttgtgtacccacaaggaacaaaaatgtgaacatacatcctccttcacctctgaaatttctacacaaatatttccaaattaacactctatttaagaataccttgtgagtggcctcagcaaccattgcaatggttactggatgcctttggagtggcctgtcaactgcttccatctgttattcacaaagagctcagtgcagcgccaggaacatgggtgcaggatgagtgctggctgctgctattgcaatgtccagtgctccctgcacgcccagcctgaccataacagcctgagcccagccaaaagtggggtggtcaggggcagcctctgcaaaggggtgactcgagctgagacccagaggaggaggatctggcggaagagagttctgggcagaaggaacagcaaagaaaaggtctgaggtggaagcaacctcagggcatttgagaaaagtaagaaaacaatgtgactggagggaaatgaatgagggtagagctgcaaactgggaggctgatcctgcctcgaagccacactaggaaggtgaccttttgttctgaatgcagttctaagcaattagaggtttttaaaataagagaccaacaggatccaattttatgtgtataaaataaaatattctggctagtgtctggagagtggattataaggtgaaagaatggatgtgaggaaccaattagaatttaagtgaccttggacaagtcatttgatctctctgaccctcagttctctcatctgtaaaatggggataagaaagtctgcctctgagatttcatagaaataggtaatattatgacttcagtgcatccaacacaaaataggttctcattcagtataattccctgttttccctccattccaggtaaggaactccccaagactttgcacatgcatttcattcgtcttttgtaacattaatattgatggtctttgctactgaaacgctgaggcataattaattgattgcatgagctgtccagagacacccctgtcaattgtaatgaaacgccatacagtgtttcattcatattgaggggaatcgtgttatggcaacatatttagagttttcctttgctgggagtttacatcctttgaagatgtggtctgctgtcctgaagacagcaggtcaaaattacaaaataaatcatatatcaagaataagactgctgctattcatcttggacagctgtgagtgcccagtggggtggatgatcataaaaaccccattgttctctgggaaaaagtccttacttttacaataggcaaatccgccagctaagctgcattcaatctggacccttcagggcagctgccatattgcaacaactgctctgtctaaagatatgcactatcttatttctagacaaatgcaagcacatttcagatgatcggtttttaaagattgctttaaatgtatttcatgggaattacgatgaaatataccataattatttcattatagcctctgcaaaggcttttattttcccttttgttcccaatgtagatggttaaagtacagttttcaaaaaggcaaaattatgactctcatgcaaatataaaatgaactcatgtcaaagattttaatcaattttgatcaattaatagggaatcaatgaaatgttaaaactaggtcaaagatcgttgaggatacttgtccaacttgaatgaatttatttttaaaaagagatcattgaggggctaggtaggtataggcaatttaattaaggcatattagagtgtgattgcaaggctaagtatgaaactggttaaagtcctacaagataataaacctttcagattattgtttcagataataaacctttcagataataaagctttcagattattgttttttactgaacggcaattatttgtctatttaactggaaaaaaaatctgcaaagtagcatgtaagtttcataagtccttttttttttttttttttttttttttttgagagacagggtctcacttcctcacccaggctgtagtgcagtggcgcgatcttggctcactgcaacctccacctcctgggctcaagccatccactcacctcagcctccccagtagctgggactataggcgtgcaccaccacgctggacaatttttgtattttttggtagagacggggtttcaccatgttggccaggctggtctggaactcctggcttcaagtcatccacacgctttggcctcccaaaatgctgggattccaggcatgcaccatcacacccagcctaagtcttgacctttaatcaatactctttataagactctaaaactctagtcccttaaatacttcatcactgctggattctccaagctcagcacccacattcttgtgaaacccactcccaacacattcaagggataatgattccgtgtgcagactagttacgccttgaggtttatcttctggacatggctggtggtcattcttaccgaaggtcatccaaaagtgtgggcaggggcgtcacagaaatcttccctcttaccctactccagacagaaataggagcgctcatcctggtgtttgtgatttcttacctcttaaagacttgaaaatgggggcgttatgtcacgcctctctttcattcattaattcaacaagtagctaaagatcccctactctgtcctggatcatgggacgcagtccagaacaagagggtgtggccctcgctctcctggagcttacgttcttatggggagacagaccctggatgagttgaaccctaatgtgacacgtactgatgtgcaaaggtgttgggcagaagtatggggagaactagtttggtcaagagggtgtcagggaccctttttctaaggaagtgacatttaagataagcctgaaaggatgtgtggaatttcactgggtggaaagctgctgactgctttggggtagagagaacagcatgatggagggactcaagccctcagaaagggtgacaccctggaggccagtgaggaagtgatacctatgagtctggaagtgtgggaagaggcaaaatcacacagggccttgatggtttgggcacagtttgggctttgtccaaagggtaatagggagccactgaagggtggtagagaggggagtggcatgatcaaaatttgtgtccctgaaaaactcgaggacgacaacagtgccatatgtaataaacattccataaatgtttgctgaatctgtgaaggaacaattggctgacccagaaagacaccccatgggatgcctgacaccaggaagtacagtcattgtccatcggctgtagctcagctctctgcttttcaatgtcatctcatacactcactgggctcagacaagtgatagcttcatatcttccctctcacttgaggatttctgcttcaccatggagaagagaggaaatctctacaggcaggaatgcccctcacaatacacatgcccctaactcctttggggaccttttttctatggaaaaatgagttaaaagtgggtacagcagggaggtgacacatcccccgggttgcctgcaagttattccctcagcggcatgagggctgcagctgattctgtagttttgagtagtctgggtgttgctaagaatgtgctgggaaacatttcaagtttccttgacaaagatttctaaacaaatacatcatccaacaaagaggtaatgcacagggtagattagggtacaaggaactgtgcagtctcattcaccgtgggtggaggtgtgaattgattgaactttgctggagggcaacgtgacagcatccggagccctgatggtttccacccaccgacttcccactgaagaatttatccatggaaataaataaggggagttgcaaatattagctataaagatgatcatttcagcattgtttgtaatagctaaaacctgcaattagctaaaatgtccaaaaccaagaagaaaaattatgtttcatctgtacaatggaaaaccaagccactgttttaaagaatattgaaaaatgtttattgacacggaaagatgctcacaatttacttatttatttatttatttgagatggagtctcactctgttgcccaggctggaatgcagtggcaccatttcagctcactgcaacctctgcctcccaggttcaggtgattcttctgcctcagcctcccaagtagctgggtctacaggtgcacgccaccactcccagctaatttttttttttttttgtatttttagtagagatggggtttcaccatatttgccaggatggtctcaaactcctgacctcatcatctgccccctcggcctaccaaagtgctgggattacagacatgagccactgtgcccggtcccacaatttatttttaagtgggaaaaaaaagcagattataaaattgtgtgtttcatattatgccattagattttaaaactttaatgatgactctaggtgtgtatgtgaacaactatgcaaaagaaaagatctggaaacacaaaaaccgaaggattaacagcagttacctgtggtggcagcactgcaggcattttaattttcttctgtttgcttattattatttttactttttctttaatgaacttttattacttttgtagaaagaacaaaatgttttattttcaaaaattgttcatgatctcctgggatctcagctgtattagattttgtgggggatgttcaatgtctttctgggtgcgtgaaggatctgattcttcttacgctttttagatagacttgtagtagtgtttcccctaatccacacagacctgcttgtctggttaagatggtatttttcagcattggtcttccaattccatttttgtaacagaatagagatattaggcaagaagcacaataattttcaacaaacataatggaagagttggtcacttttgctttatttatgaaagtatgaacaaaggttaatgagtttaaaaggtgtaattaaatttatttagaaaaataaaaaacaactggaaggataaataccaaaaatggtgtgaattggtatcttttagtggtgggattatgggtaattttcacttccttcttttatttctctctttttctgtaatgaacatgtattgatataaaaagattgggaaaggtgattactttaaaacctaaagaaacaagttgccttcatgtaattacagtggaaagttcaaataagaagggggctcggccatcactgccgtggtaacaaggcgactttttttagaactgtgtggctaactgaaagagcatgggttggagaattaggagactgggtttgatcctggctttgtgaccgcaggcaagtcactaaccccctaagtcttttgtcattcactagtttttcttttttcttttgttttgtttttgagacagagtctccctctgttgcccaggctggagtgcagtggcatgatctcggctcattgcaacctccgcctccagggttcaagcgactttcctgactcagtctcccgagtagctgggactacaggcatgcgctactctgcccagctaattttttttatttttattagagacagggtttcaccatgttggccaggctggtcttgaactcccggcctcaagtgatctgccctcctcggccccccaaagtgctgggattacaggcgtgaaacactgcgcccagcctcttgtcattcacttattaatgaacatttactgagcatactctatgtacctgggtctgggcctgacactggggacagaatagccaagtgaggtgtgggcccagcagtcacagaactgccaatccaattcagaaggaaaatagcaaaaaccagacaaaaagcaatctaatagtaataacagtcacagctgcctgtaccaagtacttactaaatgtcaggcacctgtacatgacagagagagagatacccatatgtatacacaatatataatggattgctatatatatgtgtgtgtgtgtgtgtgtgtgtgtatatatatatatgtatatatatatatataggatatatgttgggtacatatatatatcaacccgtcatatatagtgtgtgtgtgtatatatacatatatataaatatctcaacccatttaattctcacaataaccccatgaggtaggtattactattattaccattttacagatgaggaaactgaggctctaatagggtagctaatttgcttaaaggtacacaggtacgaatttctaccccactatgtgcgctatgctgcactgaactacataactacaagggtcataatttccacaaattaaaacagggccatgacccaggagttggaaaccagcctgggcaatggcaaaaccccttctctacaaaaatacaaaatttagcccggggtggcggcacgcatgtgtagtcccagctacttgggaggctggggtgggaggactgcctgagcccgggaggtcgaggctgcagtgagccaagatttcaccgctgcactccagcctgggcaacagagtgagaccctgtctcaaaaccaaaaacaaacagggccatgaaagcatattaggaccatccgacctcgtctcaggatacaggtaagtctgccctgaggatgtgacatttcacttagaccccaaggatgtgaaggaacaaatcaaagagcagggacaagagcctctggggtggaagaaatgaaatgaaagggcatgatgaatttgtatgaagctttctaagagagtgggattggagtagcagtcactggccacggtgctaactgcaaattctcttctcccctctccacccacaggcactcctggccagggcactttatgacaactgccctgactgctctgacgagctggctttcagcagaggggacatcctgaccattctggagcaacacgtgccagaaagcgagggttggtggaagtgtttgctccatgggaggcaaggcctggcccctgccaaccgcctccaaatcctcacggaggtcgctgcagacaggccgtgccccccattcctgagaggcctggaagaagctcctgccagctcagaggagacctatcaggtgcccactctaccccgccctcccactccaggccccgtttatgagcagatgaggagttgggcggaggggccccagccccctactgcccaagtctatgaattccccgaccctcccaccagtgccagaatcatctgtgaaaagactctcagctttccaaaacaggtacgcatacttccacctactagacatgggttgaggggtatggaaacacccagaggcctaactacctcttgaggcatgggtgtccttcagatcaaacacgcaaaacgggagcccagattgctggcaatcacgctcggggagcttgtgtgccaggttgggatggagaactcagcggcctccacccccttgtcgttgacacccttggcgccactgtgattccccagctctccaaggctgggcacactctgtgggaaatggaatgcttagctgagctgtgtgggaaggcactgaggatgttcgtggcacccttttcacaggatgaaggatcaccaggactgccagtgacaaatgggagggtggggtttccatgggttcagaggcaagaagttacacatcgcatttaaaatgtatattccaggctgggcatggtggcttacacctatctatattcccagtactctggggggacgagacaggaggatcatttgaactcagagttcgggaccagcctgggcaacatagtgagaccctgtctctaccaaaatttaaaaattagccagcatagtagcacacatgtgtagtcccaactacttagtgggaggctgaggcaggaggatcggttgagcccaggaagtcgaggctgcagtgacctatgattgtgccactgcactccagcctcggtggcagtgagaacctgttttcaaaaaaaaaaaaaagtatatccccttcaatgcagaaattttatttctagaactgctatggaaatatacaagcaggcaaatatatgtctggatgaggaggctgtagccattatggcatagaaaactcaaagaggcctaaatgtttattaacagtggattggttatacatatcttggcatatcaccacaacaagctgctgtgcagttgtttaaaaaaagaatgaggcatttataagagggaagaaagatctatttaaacaaaaaccaaacagatataaactcaaaaaagaggcagggcgcaatggctcattcctgtaatcccagcactttgggaggcggaggcgggcagatcacaaggtcaggagttcgagaccagcctggccaacatagtgaaactccgtctctattaaaatacaaaaaattagctgggcatggtggcaggcacctgtaattccagctactcgggagactgaggcaggagaatcacttgaacctgggaggggaaggttgcagtgagctgagatcgcaccattgctccccagcctggacgccaagagtgaaactccatctcaaaaataaacaaacaaacaaaaaactctaaaaaggaattctgtatgtgagtgtgtatgtgcatgtgtgctctcacactgagactgagaagaacatgctccaggcatagttaccccaaggaaggggaactggttaaagagaaagggagcagtaagctggggcctttattttattcattcctgtgtcctcagcacgtgggaccaggcctggcctggggtaggtgctcaatacatatctgacaaacaaacaaattaggaagttgatttttatgtcatattgaacatgtatgacatctgtaactttttaaaatatcaattattttgtttttttgagactgggtctcgctctgtctcccaggctggaatgcagtggtgcaatcactgttcactgcagcctcaaactcatggcctccagcaatcctcctgcttcagcctcccaaagtgctgggattacaggtgtgagccaccatgcctggcctaaagtatcaatttttaaaaacagaggaaaaagagcattcattaaatgtagaatgggctaggcttggtggctcattcctgtaatcccagcagtttgggaggccaaggcaggaggattgcttgagcccaggagtttgagactagcctgggcaacatagtgagacctcatctttactaataataataaaaaataattaggcaggcgtggtggcaggcacctatagtcccagctactcaggaggctgtggaaggaggaccctttgagcccaggagattgaagctgcagagagctattattactacggcgcccctgcactccagcctgggtgactgaccgggaccctgtcttaaaaaataataaaacaaatgcagaatgaaaactttttttaataaggaaaagaattaaagtaaggaaggagaaaaagaatgcgctatttccctcaaagccctggccttcatgaggtgttgagatgtagagcagatgtgcacaggcctcagtcactgcaggcatttcctgccatcagatgctttgctttcagctcccatgacacatcccacccggccacagctctggcagagggtcttggcaaggtctgtgtgcagggaaaggccaagctccctgaggcatgtgctgtgggggccccaggaatgtgctactcaccattcaggccttctccacaccagcttccaaggttgtcttcaaacaggaaagtgttgattccttagaagattttgaatactttacattttctaactccctgggctacaagacatagaaccagacagttgttacatagaacagctgccagcacaggcactcgctacaaacaccaggaggaagctggtggcgccttctgaagcagtcaatgaggtggacactaactctcttttctggaacaactggccccgatctaggcctggcatgctcagctgctgtctgagcagctgactcggagcagagctttgctgaggtttcttctaagaacaacaagtgacattaactgaagttaacttgaatttcttccaaagccatgaaaagaaaaaacaaaaaatcaatagcaattccttcctctccctgaaaggaaaacagatgcgctgtcctctgttggttgaccagaggaccctcgaagaccacttcacaatcagttaagttttctgatccacagaaaaggctggcaaggctggcacctcctccctgctcatgccactcaatacaatgacaggctcctacaaggtacttagtaaatacctgttgcatgaatgaaattgaccaaacacaacacaaggtttcaaaaacatggagtccactatcaactgctagactgacatccgtgtgaaaggaaagatgagtttactattgaaacttaactttgaaaaatgatcagggcattagcaatgagatttgtccttgatgttaagtgcatcaaccatttgaggccttgcttgtgcaggctgtggcaaacaacagaaaccgcaaggaaattcagggggggtccctttaaccactgagcagagttcttgaggtggccacagtaaaaccccccaggggaatttcctgccttgttttccttccttaagttccctccatgtctgccctacctacaagtttgctcccttccttccctcccttcctatttatttacttaaaaaaaaaaatttttttttttttttttggaggcagaatctcgctctgtcacccaggctggagtgcagtggcgtgatctcggctcactgcaacctctgcctcctgggttcaagagattctcctgcctcagcctcccaagtagctgggaacacaggctcccaccaccacgcctggctaaattttttttgtattttttagtagtgacagggtttcgccatgttggccaggctggtctcgaactcctgacctcaggtgatctgcccacctcagcctcccaaagtgctgggattacaggcgtgagctactgtgcccagcctatttacttaaacattgttttaatttattggctgggtgcggtggctcacacctgtaatcccagcaatttgggaggccaaggcgggtggatcacctgaggtcaggagtttgagaccagcctggccaacatagtgaaaccctgtctctactaaaaacacaaaaattagccatgtgtggtggtatgcatctgtagtcccaactactcagaaggctgaggcaggagaatcgcttgaacccgggaagtggaagttgcagtgagccgagatcacgccactgcactccagcttgggtgacaagaggaaaactccgtctcaaaaaaataataataatttttaatttcttgccttctctgtgcttggagtctcttagcaagagatgtggtctgtggcttacaactcaggagtgccatctcatttggcttctggggcagccaatgttgcactgggtgattggggacctcccaacaccctttgtgtttctccttcctcctctgtatagggagaaggttggaccccatcttttctaaagtcaccttcagatgtaccttttggtttttctaaatactttcttcttcctctactctgagaaggaaggagctagaagaacttgaagaccagttaacaatcagttacacattttctgatccacagaaaaggcaggcgtctcctccctgctcatgtcatctagccattaaccctgaggctaaacccgcccagaaaatacattccaaatggaagcggctgttggtagacggggcaactctgagccacgggttttgaactgttttcccatggcaaattcacaggcttggaacacagcctttgtgaggcacttcacggactcctttctatatctgtgttgacagtctgcagactaagagtggccccaaattaacatccgagaaggtggaaacatgtcatttttctcaagttgtcctaagagaggcgtctatgtgtcagaatcagacatctctatagctgggtgcgatctctgcatatctttagattagaacaactcttcattttacagatgaggacattaattcccagggaggtgaaactgctcgtgcagccacacagctgatgaagtacgacttccatcaccccccaaaacacagcccttattccttgatcttctttcacctgactctgtggctgacgctattctttctgatgaacactttactgaaatttcacctacagatgctacgttacagctctgtaacttatatccagaccacgaaacaacaaaactaccaccccagaagcctccagtgccttctctctgtcacttccccactagggtaaccactatcttgagctttgttttactttttatcccaacttccttaatataatgtgctggcctaatttaaaaaaaaaacccaccacatcaagagcatatttgatttcagtttaaattcagaagggactcttgtatttcaagagaaaagggtcagatttcctggtgaaactgcttttggatccactagttcctgaactggagtttccttctgtctccctaaacctttcgaaactgtgtttctcaaacatgttccttaactgattgccatactgggcctacgttttccaagaagcactgggcatttttgagctggcttccttccatctgaaatgtcatacacaggaaagtccctttgctctgtggaggtgcccttataggcaaaggggatcccacagtcagccatcaaaataaaatgggcctgaagtcatggggaggaatgggccttgggacagcatttggaaagggtctgcggggggagaaagcttggtgtgtttctgggaggtaccactggcggtacagccagtggtccgggacactcactcaaggtccctgggtgtggcgggtgcatagcttgtcagaccgggtaagcagcttggatttctggcctggcgcggtggctcacgcctgtaatccttccactttgggaggctgaggcaggtggatcacttgaggtcaggagttcaaaaccagcctggccaacgtggtactaaaaatacaaaaaagtagcggggtgtggtggcgggcacctgtaatcccagctactcgggaggctgaggcaggagaatcgcttgaacccgggaggtggaggttgcagtaagccgaaatggcaccactgcactctagcctgggtgacagagcgagactccgtctccaaaaaaaaaaagaagcttggatttcattcaaaatgcaatgggaaaccactgatgggcttgtccacctagaccaatcagcctgagaccatcaggaacaaagtcaggtttactgagtgtaaagagggagatcacagagcagaggaaccatgaggcagctcacaaacaggaaaaggtagcatcgtgatgggatggggaaaggcggggtttaggtgaagtctaagcgaagctgtgtcttgataggctctgtgcacaacacggcagcgtgcaggctggacgagggccgctctccccttgggaaccacgaagcggagatagagggggagtcctggacccggaaaccccttgtctgaagcgctacatgagggcctgggaatcaaggctgcttctctgtcaatgactcagatcccccaggcgagagtgggatgcttcattcttactgagagcgctttggaaagctgggcttcgagagcctaggatttcagggaaccaagtttctcagggagtaagaaagcagtcgtcactcaacgaagggggctgttttgacatgtgacagctgcagcgtgtccttggaagaaatgttcatcctgttcgcattgcggctgctttgtctgcatccgtgagtctagccagatgaatggcggggtggatttttacactgtgtgctaatgtttaccatccaagccgtacacatccactcaccaaaaacaaacagataaatctagcatgtacattcccagtgctgcatcccggggacaccatgatgaatagagggaccctgacccagtcctcagaaactgctcctctgcctgcgttcccctccctcagctctgcatattgaaaccctaacatcccctgagccaacttggaaagccccctactgagcaacagctccttgggacgccagtgggaagtacactccccctgtcctggactccggagcttcaccctgtcctctcctccaggccctgtcttgcttaccagcctgtgcccagcctatattcagacctcatttccctcttagactttaagcccgtggtagacagcatcttctactctagaaaaatgtgcgcattcctagtcccctcctagagacgttctagttcaggaggtctgggtgggagacttggcagctgtattattttaaagttccccaggggactcggatccctggctgggtttggaagctgctctgtggcacccagtgtggtacccaccattgagccaacatcattgagctctggaggattaacttgaatctgaagttcccattcacagacccaggttccatggctgagaccatgtttcccaaagtgccttgagcaataactggccaggtgctctcaataaaatataaatcggggccaggcgcggtggctcacgcctgtaatcccagcactttgggaggccaatgtgggcagatcacctaaggtcgggagttcaagaccagcccgaccaatatggtgaaaccctgtctctactgaaaacacaaaattagcctggcatggaggcatgtgcctgtagtcccagctactcaggaggctgaggcaggagaatcgcttgaatccaggaggcggagtttgcagtgagccgagatcgcgccattgcactccagcctgggcaacaggagcgaagatccatctcaaaaaaaaaaaaggtttatatgtatataaattggatggtcaatcccatcctttgtaggacaaaattcaaactccttcactgacctgctccctgttaacctttcccactccacctctccctcctcccctccctcgctcctctccatcactttcacattgccaggttctcttctgcctcccactgctgccagcaaaagctgccagctgcagctcaactggtcacctcctgcttccctgcctcagcccaggtgacaagtccttagacagctctcagacctcagtttcctcccagaccttgttggtccctccaccttacattcttaaagtcccctctgcctattgcgtgcacttctccagcctcagcctagctagatgaatgtagacgaatagctcagtatcagagtcacagcctcctggtccctagagaacatcggaatcacctggcaagcttgttaacactgcaggttcccggcccccctcgacacccagagactccgtccaactcgcgtgggcccaagaatcttcatgttaacctgcttcaggtgaacttcccaggtgaggcaggtaaagaacatcgtgggccacgtgcgaggaaggctgcctccaccggggagcctcccacccgtgccctgctgtcttgagagtgaagagcctgccagcgggggtgccgggcgaccccttcagcagtatccacccagctgtctctgcttttggagagatgactttgaacctgattgtgatcatcagagtgacatttccttttcctcttttctcctcctttctctccaaggccatcctcacgcttcccagacctgtccgggcctcactgccgactctgccttcccaggtgtatgacgtgcctacccagcaccggggccccgtggtcctgaaggtgagccttgttcaggggcccctcatcacccagacctctgcgcccagagtctggggttcttgggatcatgcccacattgcatttcagcattaccatggcggccaggggctcagcctccagaatacacatcaccactcagaggccaacttcataacctcctttttacccatggagcccagtcctgctctagaaaacattatgactacttgagttctgaatattttgaaatttttacttttcatttataatagattgttttttctttttcttgttgagatggggtcttgctttgttgaccaggctggtctcgaactcctggcctcaagcaatcctcccatctcagcctcccaaagtgctgggattatgggcataagccaccgtgcccagccattatttataatagatatttaatatatgtatgtgtgtacatacacacacatttttttaaatgatattttgaaggatatgcaccacagtcttaacacggattatcactgattatcttaacattgattatctctgggggaagaaattttagttgtttttttttaacttgtttgtatataagtggaatatcacatttgtaagacatgcttcatgtgatcaaaaaatagctttgctcctttcttagcccatccaaatgctctgcggtggcgttctccccacccacctaccattgggatcagtagctcccaactttcgttgtatgcaaaagcatctgagagctttagccatcctggtgcctgtgccccaaccccagagactgttgaatcaggtctagatggggcccaaacatcaggatttttaaaagccctcaggtgattgtactgagcagccaggattgagaaccacagttccagtctaaataaaatttcaagcaggctctgtgacttcctggtcactcacaggtaataagtcacttttggccaggtgcggcagctcacacctataatcccagcattttgggaggccaaggcaggaggatcacttgacactaggagttcgagaccagcccagccaacatggtgaaaccccgtctctcctaaaaatacaaaaattagctgggcatggtggttcacgcctgtagtcccagctactagagagggtgaggtgggagaatcacttgaacctggaaggtggaggttgcaatgagctgagatcacaccactgtactccagcctgggtgacagagcaagactctgtctgaaaaaaaaaaaaatcaaaatcaaaaattaaaaaaaaaagaagtcactttagccttgctaggctcagttgagaaatttaattgtccaggcaataatcaaactttctagttcatttaaagctaaagctcctgctgcccagcttgggcctgcctgctgggctgggctccagggactggctaagttctctgctggttcaccatctcaggtttctaccctttctcactcactgggtggtctcagactcctgcagggctgcaagaggcaggcagggacaaaggtcctgctcacctggttctgttggcagatgtgctaatagcagtggccagtatggcaagctgattctttctcttctggggtattcctgtaagtgccccccacctcctacccctcacctccttgctgagcatctcttacctgcaagtccctccaggtggacaaatgcatctcctctggctgctggctcctcccttagctctggggcaggcaggtcatttccagccacatcctcgtgacattccctgagccattcctccctggctcttgctccagctcttgtgtgagccatgcctggtccatgacaaacacacaagctccctttgccatgatagactccaggagcacaggcgcttgccttgggtgtaaaagttatcaatgggccgggcgcggtggctcacgcctgtaatcccagcactttgggaggctgaggcaggtagatcacgaggtcaggaggtggagaccaccctggctaacgcggtgaaaccccgtctctactaaaaatacaaaaagttagccgggcatggtggcaggtgcctgtagtcccagctactcgggaggctgaggcaggagagtggcgtgaacccgggaggcggagcttgcagtgagcagagatcgcgccactgcactccagcctgggagacagagtgagactctgtctcaaaaaaaaaaaaaaaaatagttatcaatgaagacacacttgtatgactcatttcactcatcttgccctaatcccagccccactagaccctgtctttatgtaaaactgtgacattttgttcaccatgatttttttgcattatgatttttaaaaatattgcattttaaatagtatttactatgatgattgagttttttggtgccctcttaatgttgtgcccaaggcaactgctttgctctcctccccctggtcctgaccctgagaacaggccatccacagcacggctgccaccctctctcttttcaactttcccaagccagagtcagcgcccaaccactgtgaccccaagctcaggggatacaactcaagtcattgaatggtcccatgggaacacttgatggtttgcttttggggagtgaaaggcaacccccgctacaccgcaccccatttcccagctgaggagagccctcaggagactcacagcccaactccctctacagaaaccccttccaatatccaactctttctctctttctttgcaaaacctattttggtgctctcttgccttgctttggaatttgtaacctgttttttgtatcctaatatatatgttttttaattactgtacacattacatatataatatgttatgtcatatatatatctcaagccactgaaggagtttgagcaggggagtgacaatcagatttttaggaagcacacatcatcactggccgtcagagaaatgcaaatcaaaaccaccatgagctaccatctcacaccagttagaatggcaatcattaaaaagtcaggaaacaacaggtgctggagaggatgtggagaaataggaacacttttacactgttggtgggactgtaaactagttcaaccattgtggaagacagtgtggtgattcctcaaggatctagaactagaaataccatttgccccagccatcccattactgagtatatacccaaaggattataaatcatgctgctataaagatacatgcacacgtatgtttattgcggcactattcacaatagcaaagacttggaaccaacccaaatgtccaccagtgatagactggattaagaaaatgtggcacatatacaccatggaatactatgcagccataaaaaacgatgagttcatgtcctttgtaggaacatggatgaagctggaaaccatcattctgcacaaactattgcaaggacagaaaaccaaacaacgcatgttctcactcacaggtgggaaatgaacaatgagaacacttggacacagggtggggaacatcacacaccggggcctgtcatggggtagggggagtagggggagggatagcattaggagatatacctaatgtaaatgacgagttaatgggtgcagcacaccaacatggcagatgtatacatatgtaacaaacctccacgttgtgcacatgtaccttagaacttaaagtataataataatcataaattattaaactaattacacagataaaaataataaataaataaataataaaataaaataaaataaaaaagatttttaggaagcacagtgcctggcacttaggtcattgctaagatgcacatttatcaaatgagtctctcataccctgtttttattgctgtcgtgatgtgcacagtgtcatccagcttcgtgtctggtcattagtgggcactcgttgaatatttgcagaataaatatgaatgataaaacaggaaaatttctactgagaaaaagaaagaagacatattaggtctcagtctcatttatcctctggcttaattttaagatgaactcaagataaattaccatttttaatttaggcaactgcagttaaggctctcttgtttgccccccaacctttggttgagaggtctttttttttttttctttgagatggagtttcgctcccgttgcccaggctggagcacaatggtgcgatcttggcttaccgcaacctccacctcccaggttcaagagattctcctgcctcagcctcccgagtagctgggattacagtcatgcgccaccataccaggctaattttgtatttttaatagagttctccatgttggccaggctggtctcgaactcccgacctcaggtgatcctcctgcctcagcctccccaagtgttgggattacaggcgtgagccaccacgcccggctgagaagtctctttttaaagcacaaagtccattgttgaatgtataccctgttatgggaaaaaggactgtgatgtcccctgcgttgcctcagacaaggaaggcgggagacctgtcacccagatttctaccattacagcatcatgaccaaaagcaccgaaaagtcttcaggaatttgtgtcttcctttggaaaaaaacactggaatagggagtgttcgtgatgtgtagccattaggaaagaaacattcaagttgtctgcctttgtggtctttccccaggagccagagaagcagcagttatatgacataccagccagccccaagaaggcaggactccatcccccagacagccaagcaagtgtaagtatgaagaggtgctaaggtgcggtgttatgaacacacaaaatcctctcagaaatgttattagcttggggccaggcacggtggctgaagcctgtaatcccagcactttgagaggccgaggtgagtgcatcacctgaggttgggagttcaagaccagcctggccaacatggcaaaaccccatctctactaaaaatacaaatattggctgggtgtggtagtgggcgcctgtaatcccagcactttgggaggctgaggtgggcagatcacttgaggtcaggagttcaagaccagtctgcccaacatggtgtaaccctgtctctaataaaatacaaaaattaaaaaaaaaaaaaaagaaagaaagaaatgttattagcttggtcaaaaattagaatgcaaattcctcataacagagaccttgttgcatttgaggtaaaacctctcattgcacttgtgttcaggaataggactaattacgtggttgggataagtcgtttaacttctctgtttttatgggctgggagtattaagtgagataatcctgcaaaggacccgggacagtgcctggcatggtgtgaaattatgtaatggcttcttcttacgacagacctcaggggcgtgctgtgatacagtacacttttatctgtgttgggcaaaggactttatctgaaatctgtgtaatctatgtttataattggattctaccacatgtgtcccacagacacacttacacccaaggtcattagggaacatcttacaagaaggctggcatttcgccgtgtcagggggatgcataggggtttggtggatggaaaagaaagggttgccaagggcatttagagcagagaaaccagtttgggtaaaattaaatacactggcatgagtcagtgttctgagttcaggggaaagtaaacagcttgggtggctggacctgtaagcagatggtggcagaccaggtggggtcagcgtggtggaagtcgaaagaaatgaggctcaaaagaatcctgaaggaccttgagtggtaacagaaatggggagccactgaaggagcggcggagtgacgatgagatttaaacaacgcactcgcgccctctttggaaagctactaacccggcaactatgtgtggttctcccacaggggcagggtgttcccctgatatcagtgactaccttaagaagaggcggttacagcacattaccaaatcctcagaaatcggaatggatttatgacactccagtgtctccaggaaaggccagcgtcagaaacacgcctctcaccagctttgcggaagaatcaaggccccacgctctccccagttccagctccactttctacaatcctccaagtggcagatccaggtccctcactccacaactgaataacaatgtgcccatgcagaaaaaactcagccttccagaaattccttcttatggctttcttgtacccagaggcacatttcctttggatgaagatgtcagctacaaggttccttcaagctttctgattccccgagtggaacagcagaacaccaagcccaatatttatgacatccctaaagcaacgtcgagtgtttctcaggctgggaaggagctggagaaagccaaggaggtgtcagagaattccgcgggccataattcctcatggttctccagacggacaacttccccatctcctgaaccggacagattatcaggttccagttctgacagcagagctagcatcgtttcctcgtgctccaccacatccaccgacgactcctccagctcttcctcggaggagtcagcaaaggagctctccttggacctggatgtggccaaggagacagtgatggctctgcagcacaaggtggtcagctctgtcgctggcctgatgctctttgtcagcaggaagtggagattccgagactatctggaggccaacattgatgcaatccacaggtccactgatcacatagaagaatctgtaagagaatttctggattttgcccgaggagtccatgggactgcctgtaacctcactgacagtaaccttcagaacagaattcgggaccagatgcagaccatctccaactcctaccgcatcctgcttgaaacaaaggaaagcttggataatcgcaattggcctctggaagttcttgtgactgacagtgtccagaacagcccagatgaccttgagaggtttgtcatggtggcacggatgcttccagaagacatcaagaggtttgcctccattgtcattgccaatggaaggctcctttttaagcggaactgtgaaaaggaagagactgtgcagttgaccccaaatgcagaatttaagtgtgaaaaatacatccagcctccccaaagagaaactgaatcacaccaaaagagtaccccttccactaagcaaagggaagatgaacactcttctgaactattaaagaaaaatagggcaaatatctgtggacaggtgagttcagagttccaagtgatcgaaaaaggggcttcaattgttacctggagtagtggctactaagatgctgagactctttccatagtgtataggctttggggagacactggttccattttctagaaaataaaatttatgaaagtaaaattcttgatgaaatcttattaacaagtcagataaagataggtcagcataggcagataggtcagttgatttggatttcttccgaaaacttttggcgttcaagtttaccatattagaattaaaagggatttttaaatttcttaaaaatttattatttgagtagatttttaaaacctcaccaccaagtctccttgcatttttgaaagttataaatttagtcattctcagtgtgtttcttagcaacgaaagaggaagtagaaacattctttcaaattgcccatggtctgatcagcccccagacttcagctactcttagaaatacttttctgaggctgggcctggtggcttatgcctgtaattccaacgctttgggaggccaacgcaggaggatcccttgaggcaggagtttgagaccaggctgggcaacatagtgagaccccagctgtacaaaatttatttttaaatatccaggtgtagtggctcatgcacttgggagtctgagtgggggtatcccttgagaccaggagtttggggttgcagagagctatgatggtgccactgcactccagccttggtgacagagcaagagctaatctctaaaaaaaagaaaagaaaaaaaagagttgggatatagtggctcactcctgtaaacccagcactttgggaggccaaggcgagcagatcacttgaagtcaggagtttgagaccagcctggccaacatgatgaaaccccatctctactaaaaatacaaaaattagctgggcatggtggtgtgcgcctgtaattccagctactcaggaggctgaggcaggagaatcacttgaacccaggaggcagaggttgcagtgagctgagattgcatcactgcactccatcctggaccacagagcaagactctgtctcaagaacaacaacaacaaaaaaacaaaagacagaaagaaatacttttctggatgagttcagacattatagagcgagatgcttcagttcagggattgtgagccttaagaggcccagaagtcacttgggggctgtgtcaaggagataatttgctactttcagccccgacctttgtgttctgctgaaatgcctggtggtgtaggagctttaacatgttctagaaatttggatgtttaaaatttacatacacatatatataactttaaacaaaccatgtgggtcattatatcaggccatgttgataggcaaaattcagcctttgggtggccaaagtctcctttggttgagaaaaggaatcagtaggcagaaccatcaacagaaaatatgagaaagaatgctcaagtctaaagtgaacttaaacagttccactgtagtgtaaaacaccactcaatttggtaagttgaagggattttatttttcagacattgcctaacttagaagagaaagataaacctatcttggaataaaggttagatgaaaacaaagacttaggaaccatggtaagctatagcactcactctctaaagcttctgattcatacgctctattgctagattcgtctcatcatgctacggatagctcaacattacagccatgacccacatgggcgagagttcgtttttgtgattctttgtcctttattttagcaagagagtcctggagatcactgagtctaatgaacgaaccccagggaatgaaagtgaagcattaaccattactgaaatgactgtaggggctctgcaaggttgttgtgggtggtactgacagggctaaataggactgactccgttcctctttgacattctgatttaatgtttctgattacaacagcaaatcttgatttggggcttgtatatcttcaacacctcttttacacttgatgttcttccttttttaaaaaaaaaaaagtcaaagatgttatcgttgtgcttatttttattggtttccttctatttgtggtcaatgacagtagttttccatttaccatttttcacagtttcctttaaattaatgtaagtaaaaacaatgggtccatttaaaggaaaggaatgaagccagtagaagttaagaggaaggtggaaagagtataacttgtaaaggttgtaaaggttgtctctgaataactgagcttgggaaacttacctaggttatagggcagatggggtagagggtggaagaaaaggatgtccaatgataggataaggtcatgtaccttctcagaggcaaactaggacaagaattcaggcctcctgatgctcagctccctgaaccccaaacactagtctttgggcctgccatattgctgacagttatgctattttgttcaacattaagtaggccttagactagtggttctcacatttgagtgtatcacaatcacctatgatctttgttaaaactcacatggctggccgggcatggtggctcacgcctgtaatcccagcactttgggaggccgaggcgggtggatcgcctgaggtcaggagtttgagaccagcctgaccaacatggtgaaaccccgtttctactaaaaatacaaaaaattagctgggcatgatagcgggcacctgtaatcccagctactcgggaggctgaggcaggagaattgcttgaacccggaaagcagaggttgcggtgagctgagatcgcaccactgcactccagcctgggcaacaagaacaagactctgtctcaagaaaacaaacaaacaaaaacaaacaaacttgcatggctgggccccgctctcagaatttttgatctagtaggtctggggtgcagcataataatgtgcatttctagcaagtttgcaggtgacgttgatgcttctggtccaaggacctcacttggaaagcccccgctttagactgacagcacttctcagtggaggcccggggcaccgttggccaccgggtggacagttctccattgcgtggtgaaccgttcagcatcccagaacccctgcccgctcactgcctatagaagtccctagtcaatgcgataaccaaaactatctccacacatttccagcaccccatgttaagaatcttagtacatttttcacctccctacggttaatattttcacttaagatgctcataatctgatgcctacctcattacttctcgttatttctaaactcttctttttttttttgagacgaagtcttgctctgtcacccaggtgggagtgcagtggcgtgatctcagctcattgcaatctccgcctcacaggttcgggcgattctcctgcctcagcctcctgagtagctgggactacaggcgcctgccaccacacccggctaattttttgtatttttggcagagacagggagtcaccatgttggcaaggcacatctcaaattcctgacctcaagtgaccctcctgcctcagcctcccaaagtgctgggattacaggtgtgagtcaccgtgcccagctcccttttttattttatttttttgagacagtgttttgctctgttgctgaggctagagtgcagtggtgagatcatggctcactgcagcctccaccacccaggttcaatcgattctcccacctcagcctcccaagtagctgggactacaggcccgcaccgccatacctggctaatttttgttttgttttgtttttggtagagacagagtttcgtatgttgccaaggctagtctcaaactcctagggttaagcgatcctcctgcctcggcctcccaaagtgctgggattacaggtgtgggtcactgcactcaacctgcttcattcttatactccctgcttccaagagtccatgtgaactgacatttcaatctttccttcactttctatgacaaagacaatcattgttttcattttccaaatatgcaattctaataatgaaggtgcttcttcgaagtatgccttcctcttccttgtctaacttcccctccaaccctactaggagacataacccccttctgaaaaaatcagttttatgccctatctgtctgaatgcttccgggctatgaattttgagataataggtaaatgcgagcgtgtgaaatttaatggaaagaaagcaagtttcagacctagagctccagatctctcatgtgctaatggaatagccggaggcagccttttctcttctctgagcttcacctttcaattgttacctggagttgtggccactaagttaggtactgaaaatctttgagagtatgtaggatttgggagaagttggttccattttccagaaaataaaattcatgaatgtaaaattttgatgaaaccttattagcaaatatgataaatattttaatattaaggcaaaaaataaaataaataatattaaggcagataggtcagggtatttagttgcttctggaaatgttgagagttctgatatatctctgatactgaaatcagaggatttttggctttttaaatgtttttaaatctgttctttgagaaaattttaaatctcatcaagtttttgtgcatttttaaaagttacaaatttagctgggtgcagtggctcacccctgtaatcccagcactttaaggaggctgaggtgggcagatcatttgagatcaggggttcaaaaccaatctggccaacatggtgaaaccccatttctgctaaaaatacaaaaattaattgggcatggtggcaggtgcctgtaatcccagctactcaggaggctgaggcaagagaattgcttgaacccagaaggtggaggttgcagtaagctgagattgcaccattgcactccagcctggaagataaaggaaaactctgtctcaaaaaaaaaaaaaaaaaaaaaagttataaatatagtcattgccaatgtgtttcttaaaatgggtttcttgtagttggtttattgagatgattgaataaaattatatatgtatgtattacaatataatattgtatatattatatattacagtgctttgaaaacattaatttgttagacaactgttgcagtattgggcttcccaaaccaaaccatgcttttttaaaaaaaataaaaagtcttgcaaatctagccaaaacaggaaagggcagacagccacagcccattgattgaatctcctatctattttcttccttcccttctttagaatcctggccctcttatacctcagccttcgagtcaacagactcctgagaggaaaccccgcttatctgaacactgccggctctactttggggcgctcttcaaagccatcagcgcatttcacggcagcctcagcagcagccagcccgcggagatcatcactcagagcaagctggtcatcatggtgggacagaagctggtggacacgctgtgcatggagacccaggagagggacgtgcgcaacgagatcctccgtggcagcagtcacctctgcagcctgctcaaggacgtagcgctggccactaagaatgccgtgctcacgtaccccagccctgccgcgctggggcacctccaggcggaggctgagaagctggagcaacacacgcggcagttcagagggacactgggatgaggactgtctacctcccttcctcctctgctcacctctcagcttcacacccacaacttgtgcaactctgccctatgggaaaagccagccggggcatacaccaatgagctgaaacagacctggtgcccaaagctggtagtaccaagtggctaagcaaccccagggcattgacttaccccgcagggggtcaggaaagagagtcaggtatgaggtaaagaccttgtgaagtttagcatatatggagtatgcagtatcagcttgaagtgacttcgcagaaataatattttatattgattaaatgtgtgcatgttttgtttgttttttgagacaaagtctcactctgtcacacaggctggagtgcagtggcgcgatctcagctcactgcaacctccgccttctgggttgaagcaattctcccgcctcagcctccagagtagctggtactacaggtgtgcgccaccatgcccagctaatttttgtatttttttttaatgaaaggtctcacatatttattactgaacccagccaaccaatgcattcataacagattcagaaagaaaaaatatattcccaataaaacatgtacaattctccagagagcggtgacattttcagcttgatgtggtaacatgactgtgaccttcagacagcataaatatgtgtgccctctcatgtgcaattccttatagggctagcttggttcttcttcaatgtctccttttggagttgtacctgattttattaccagttttcatctgaatccactggggagtggggcgattttgttttaatttctcggtcaggaatcacttaatcctggaagtcttatgagaagacatggcaagaagcagagtcaagcacacaccacaatggcagagaaaggaagagctaatttttgtatttttagtagagtcggggtttcaccatattagccaggctggtctggaactcctgacctcaggccatcccccgcctcggcctcccaaagtgctgggattacaggcctgagccaccattcctggcatgtacgtgttttaaattcactcatttaacacttatgtattggatgcctactacatgccaagttctaggtgctggagacatagcagtgtttcagagggcttgccctcttggaacttatgatctagtaggggagtcaggcagtaaagcggtgaagaaatacatacacagtatagcaggtgccaggaaaaacgtaagtaggggaagtgcaagagaacttatcttcaaatggttaatttttattgcatccattagataatagagtaagttttttgttgttttgaattgaattagttctgtgagattggtacaaattatgtatgtgtcttgcacccataaatatatatttttgctatgttactttaacctaaagatagatgttatatttacaacataacatgatctgttgggttctctattaatttatttcatacattatagattctgggttgataaattctgctcaatttgaaaaattttatattttgtctcaaatctgttacaatttatattggttggtgcaaaagtaattgcggtttttgccgtagacagtaatggcaaaaaccacaattgcttttgcaccaccctaataatattaaatataatcatgactttaaacatcatttgcagcattctttttttggaaaagtctttgatctgtgtcacccaagtgaagcctccgatgtttacttttgtcactccagtgcttctccctgaagtctgcagagagatggagtagaggccctgctcttaggcaccggattggtgctggaaaacaaagccatcacctgtggtggtgcagacaggaaggcgtggtgtggacaggatgcccatcattgggcacagatatgaaagtggcacagagctcccctcaactcaaaccacctcctcttcctctccttgtagctgagtcctcagctcacgttgccatggttacatcatcacttcattttaagtgatggtctgggcctcctaaatgcataaacacctctacagcttggaagagcatctccaggctgtaagtcacctgaaatgataccaagtccaactcctatctgctactctttccttggtaggcacttgtaaaatgttgactgctggaggctggttatttttattaagttagtctcagggtccttaaaaaaaggatcccatctttgtgaggcttggttctctacaactggacagaggccctccagggggcctattctttgaacagccatgatctgcatcagttaggacttctcttacaagggatagaaaatcatacccaatctgtcttaagcagtaaaggaaatttattaactcatatgtcttaaaatcatccagaggcaaactagccgcaaggctggctggtttcaggggctccaacagtgtgatccaggaccagtttctcggtcccacttgctctgggttaacccccatgattgcaaggtggttttcccaggttacactcttcttgattcttggccagaggagaagaaaaggacttcattcggcttggactggcttagatcaggtgctgctcctgaaagctccatgataagcagggcatggaacacccaagttaatttagatctggaattcctacccaccccacactcactctcccatgggtcctgagaggtaacgggattgctctttcaagcactgtgatgggcctgaggtttcatctttgaaattaacaagttaacctgtcaccatttcatggatgcagacagaagatctaagattctgggatcagagactatgtcagtggtccccaagaccacctccaggtccaatgagtcactaggaaaattcacaggactcagaatacagtcatattcacagctgtgacttactacattgaacagatgcaaagtgagatcagcaaggggaagaggtacccggggtgaaatctaggggagaccaggcacaagcttccaagagttttcccccagtggaatcacacaggacacgcttaattcaccccagcaacacttgtgccaacatgtgtgaaatgttgtcaaccaagaaagctcatgagagcctcagcagccagggttttactgggggctgatcaggtgggaagcctctgtctggcatgaaccaaatttccagactcccagaaggaaagcaggtgttcagtatgaatcacgttgtttgtataaacagtttaggcacaatgagccattcttataaattctggcaatggtgggaaccctcccaaaatccaagtttccatgcaccaaccgaaggtcaaccttgcaggcaggccttcataaggatatttgtcaggcctgcagtgttcatccttttgtgcatggagacagaggactctttctcctggcattgcaagcaacttggcttcaccttcacatcatttcccatgtcctccaagtcccagggggtgatgcagtggtgggctcaggtggatgctgaacacataggtttgtgtcaaagacaaggaaccttagcataggaatccccaattttttataacgggctcggagcaaatctgacaaggcttggcctcagagggagacatcatctttactatatatttatatatgtaatatatgttatagctatgcaatatagatgttagatatgtaatatagatgttatatatgtgagagatatatatatatatattcggatagggtctcgctctgtcactcaggctggaatacagtggtgcaaacatagctcactgcagcctcaaactcctgggctcaagtgatcctcttgcctcagcctgcaaaactgctgaggttacaggtgtgagccatcgtgcctagccctcatttttaatatactgcataccaaacaaacctgccctctgctctggagggagacactatctctatattccaaggctgttggaagatggttaaacaacatcctttaaaagatggttcacaacaaaatgccattggtgcctctgctctgaatatgtgcagaaaggcaagagacctatggagaactgtgtcccgagaggatcccctaataaaagtcaggaatattcttggaagaaggagggattaggccaggcttggtggctcatgcctgaaatcccagcacttcgggaggctaaggcaggagggttgcatgagcccaggagtttgagagcagcctgggcaacaaagcaagatgctgtcgctacaaaaaatacaaaaaaattagctgtgcctgatagtacacacctgtagtctcagctactcaggaggctacagtgggaggatctcttgagctcaggaattcgaggctgcagtgagtgagccatgattacaccactacactccaatctggatgacagagtacgacttcatctcaaaaaacagaaaattaaaaaggggagggattattgtgaggaggccaacaataaatttgtattgcagtggataaaattatgttttacgcttaataacagtggcatatatttattaaattattactacattgctactaaagcactgttctaatgctttatattctttaacttagtcgttcataagtgagtctttcatggtgttctaataggtaacgaaaagtccttttttttttttttttttgagatgagtccaaattgaagacctttgtcaacaaagtacaaaaccactgggtgtaaaataatgaaaaatgctgctgctagctaaatgtgtttccttcctttttttgaaacagtgattccagggtgaatttccactgattaataagatgattacctctgaaaaaaactttaaaataaaattaaacacaattttttagcttttggtaactttgtgctgagtatttttgcttaatgcctagaattctgtatggtttcctcccaaggaaggaagaggaaatggtgcgtggtgtggtggtagcaacttgacctcaactaagtcaaatttcatcaggaggctggaagtggtgaagagcccatgttagcgatcctccagtttgacaagttgtggggagttgtgtttgtggtttggtggcaactatgttttttataaacatctttttaaaaatgttatgttttccctatgtatgcgccccagttctctgaaagttgcccatttgtatgtgcacttataaggaggtgaatcaaagccacttgctgatgcccttttcctttcgttcattcatttctcaaatagtcattgagcagctcctacttgttcaggcctttgctgatcactagagatgctgcaggaaacagaacagaagctctggagcatggcgctttctttccagtcgagggagatgaaaaaccaggcaggaggtgggagaggagctcttatggaatgctaactataaggcggtgcccaaaacactgtgtatcaagataaataatatgttgatgcaattatttttaagaaataaaaatcaatgcaaaaaactccatggtgaacaaaatgtccaaatttatatttataacatgatatttgcgtgataaatgcaaagaagaaaataaagcaagatggggtaatgtgatggcagagcagtgctattttggatggagaggtcagggaagatggctccaaggaagggtcccaggagcagagggctggatcccttgagggggccagctgggaacacatgaagagaaagcgcgtccctggagaaggatcagcaagacatgtgcacagaggtaggagaagagggtggccagtgtggctggaacctaataaggaaaggaacagtggccaacattagctgggaggggtggccaggggccagttcattcaaagctttgtatattgccagaatattttgaatatttccctaaaactgcaaattaaaagtaatttttgtcttgaattatctcaggacttgcctcagttttctactttgttttaaccttctttgggacaccttcctgtgtatgaccttaaaggatggttgcaaagttcttcaaacatttttcatatctactgtcttagtccattttttgcagcattaacagaataagaacagatttatttcttgcagttctggaggctgggaactccaaggtcaaggggcctgcatctggcaagggcttttgtgctgcatcatcccaaggtggaaggtggaaggacaagagagcaagagagggccgaactcaatgttataacaagtccactgtctcgatcactaactcactcccaagataacaacatgaatccagtcatgagagcagagccctcatgacctaatcacctcttattaggccccagctcccaacactgttgcattgggattagatttccaacacatgaaatttgggggacacactcaaaccatagcagacagtttaaaaaatgtttaatgccaactcttaaaatgagttatggtaagctgcagctacggaagagcatatgagcagagctaccaggaaatcaaacctgccatggctcagaagtctgaaatgggccgggggcagtggctcacgcctgaaatcccagcactttgggaggccaaggcgggtggatcacaaggtcaggagttcgagaccagcctggccaacatggtgaaacgccgtctctactaaaaatacaaaaaattacctgggcgtggtggtgtgcgcctgtaatcccaccactttgggaggccaaggagggcggaccatgaggtgaggagttcgagaccagcctgaccaacatggtgaaaccccatctctattaaaaatacaaaaacttagccgggcatggtggcatgtgcctgtaattgcagctactcaggaggctgaggcaggagaatcgcttgaacatgggagatggaggttgcagtgagcccagattgcaccactgcactctagcctgggcaacagggtgaggctccatctcaaaaataaaaaaattatataaaaaaaagaagtctgaaatatttgagacctactgtaaggacttactataacagcatttaaagtactggttcttagcctgaggttcagaaggctgtgagtaaaatacaaacatgtatacgctatgtgaaatgtcgttatgtgctaatcaatacttttctggagatttagttcaaagttttcatcaaattctcaaacaggtccaatgactcccaaaaggttaagaaatactggttttactagagggtaatgattttcctttttatcatttcattcctctgcttccccaaaaatccatggcttggctaggacaaagttgtctccgaagatgcttgtaagggaataacctttattagttcattcaacaaggcagtggaagaagaagcagacaatgatgacatctgcttcccagtagagccgggagaataaaacggctcaagtccaataaagcgctgaacacagcacctgacatggcagccagctctcaacacatatttgctaccaatgataataaacctcacaaaagttctagctgcgtatagtctgaggcacagagtagcctagagaccaatattctaaaagaggaaaccaatgaggaagagaaaaaagtccagctgcctgagctagaacaccagcacagccggtactgctgggttttatcagcagcatttggggaagcagttaagtcagacgggcctcatcggagacagcccctcatcttatactccttttactcagcagctatgagactctgaacaaagacaacttgcacatctgagtcttggggttttcatttgtaaaacaagagggattataccttctaactcttaaggttattgtgagcccaaagtgaaaaaatgcctacaaatctctcagtgcacgcatggtcatggcttaataaagagccgctatttttgttttttcttccccaaatgagaaaagaacactggtttgagtctttctaaagatgctggtgtttctgctcttctgtatttgactttctttcctttgctgtgagaaagaactaatcctagcactcattcccgggtctctcactgcctatgtgaccttgaaggagtcatttgatctttccacgcttctgtttcctcaccagtaaatggaattctaatagtactaaccagttttagtatctgccaaaactaggcttttcacccctttctcaatgaatctgtactttcttttggtttactgaggaaatgtactcatatattgagtgtgccaaagactcttctaggcactgatgatacaatgtggaataaaagtcctggccgggcttggtggctcacggctgtaatcccagcactttgggaggccgaggcaggtggatcacctgagatcaggagtttgagaccagcctggccatcacggtgaagccccgtctctactaaaaatacaaaaattagcccagcatggtggcgggcgcctgtaatctcagcgactggggaggctgaagcaggagaatcgctttgatcctgggaggttgaggttgcagtgagccgagatcacatcactgcactccagtctgggcaacagatcgagactctgtctaaaacaaaacaaaacaaaatgaagtccctaccctcatagagcttacagttattgtggttagcatagaaataaatcataaatcaatcagagaccaactaattaaagggattattttttaaaattctcattaatcacagtaacaagtaccccaagcttacatatagcccttgaagtttccacatccacgtattttctgggcaactcttcccaagtaaaaaatattttcagcgtttttatgtttcacgtaggtcaatagggtaatatccaatcataaagatctgccttcttggcaatggagaaattttcccatcatatatatgtacaaatacatacatacatacatacatacatattaatgacagagtcttgctctgttgcctaggctggagtgcagtggcataatcataagctcactgcaaccttgaattcctgggctcaggcaatccttcctaccccctcagcctccggagccgctaggactacaaaagcttaccacaacgcctggctaatttttctttttctttcaagatggtgtctcaccatgttgtccaggctgacctggaactcctgggctcaggtgctcctcccgtctcggcctcccaaagtgctgggattataggcactttcccataatatttataataattaaaggaacaaacagagagatagacaatcgcctaagagcagacagacaatcatgaatttttagcaagggatttgtgttcttatagataaaatacagcctgactcttggaacgggcatggcaacatcagtgtatattttataagaactattatatcgtctattaatgatacttgattgttaataaaatttttttagcctgggcttcaggaaactgtgaatgaaatacacacacgcacaaactgtatgcaaaatttcacacacatgccatctacaatatgcatggcaacaccagaaagttccaggccttaagggagggtcttacttcctagaatctgttgtaacatcacttcacaagatttgttgtgagtgcttgagtcacagttggcgctcaagaaagatgcgttctccttttaaacacaaaaatgtccattgatacagcagattccgttcataggcatccttaatcgcagaaacaggagggcggcccttttcctcaaggcgctctcagtccagggatgtgcccgctccgcagccacacaagctggcgtgggatagggtcaaagagcggtggatgcgcacgggccgcccacgccctcgctgccctcccggagcgtgggcgagtgattccgattgtgcagcagaaacccagggtctcacgggaacgaggaaacccgcccacgcccagcctccaagcgacgctctccatgacaaccggcacttggtaacggcctcgccctgccccgctacgccgcgcctagcgtgccgccccgccccgccccgctacgccacgaccagcgtgctgcgtcacggcggtgcgccggaagtggctgcggatttcgccggaaatcccggaagtgacagctttgggggtttgctgctggctctgactcccgtcctgcgatgggttgcgacgggggaacaatccccaagaggcatgaactggtgaaggggccgaagaaggttgagaaggtcagtgatgtgggccggctcttggcgaccgggggtggtgggaatttgacgaccccagaaaacgagaggaagtaagaagggggagccagcggagttccagacctggctgcggtcttttattccattcagaggactcaaaattaacaacagtattaagagtggacattcaatgggtgctgactattgccattcactggacagtaatcttaacagggggtatctcatgtaattatcacaatagccctatagctacatactgttgtcctcattttcagacatggaagttgaggctcaaaaggagaaatttgcaaagctagtaaatggcagagccaggatttgaaccctacctgcgactagtagcaataatacaaatacctagtgtatactgagttttgtatacactaacttcatttgctcagagaagccttcccaaactgttcccttaccacatccttttataaactgtcttagcctgcacacggctgtacgtggttgatttgtatcaagtcttccccgctagacggtaagttcctgatagcagaggctgtaccctttttttctctgcaactagcatggttcctggcacactaaatatttcgaataaacaaatgagtgaataatccctgatctcacaagtaatcgaggaaattataataatttctttgctactgacggggacattgagtccagggatattaaggtgactaagatcacacagctggtaggtagtgaagccaggattcccatccacttatttgggatttcaaagttagcacaagtaattactttttaatgataaaatatttgtaaagcacctagtagagacttctttacaaaaatatttgtaaagcacacgtggagacttcatgtattctgattcaggagctggagagcttgtttaaaaggtaaaccccttaagtcactattgtatttgaagcattccagtggcttcccatcacattaagaataaaatctcgtcagacccttgagcagaccttgcctatgtttctgacctcatcttctgcccctctccacctctttcatactgttctagctaaacaggcctcttgttcttcaacctggagtgtgagttcatcaatctgaaatactcttcactgagattgtcacatgatgagtttctttacttcattcagttttttactcaaatgtcatctgtccactgtaactgaaatgtgcctcacttccaatattctctcttctcttcttaacagtgcctaccactgtgttgtttattgtctctttcccacgtagacaggaaccttgtgtgtcttacctctgtaacccctaccatgtgtcagccacataatagacacctaataagtatgtgtgaatatgggaatgaatgaatacccaagaggatgaagtgtaccctctgatcatacgtacatgtaaacaggcgaatgctggataattagcattcatgagtggttttttggctttcaccaaaaaagtgtttagctcagttttgttttcttgtgcccagggctgaaaaggagtagcttaatgaaaggcttgacaagaaacaggtgtcggaagagggtagaaaagaaggaagagcgattcaaaaaagccagaatgcctaggcaggatggatttttattataactattcacacaacaaatgcttaataagtggttaccatatatacattgttgtaggccccagggatatagcagtgaacaaggcagagtctagccctggtggagcttacatttcggatcaatattgtgaaatctgccctggttcctaacgcagagcacctaaattccttgtaatttcctgggtgacgggatcatcttttgttctaataaggcaattattggtgggctcctggatggggcctggtcaccagaaacaccaagccaagattagaagcctggaactttcagccccacctcacccccatccttcagggaggagaagaggaattggacatggagttaataatccatcatgcctacgtggtggggtctccataaagatccctgaagttgagggtttggagattttctgggttgccgacaacatccacatgccaggagagttaccccaactccatgaggacagccctgcacttgggacccttccagattacttctttatctggctatttatttgtatcctttaaaatgtatttgtaataaatcagcaatggtaactaaactctttccccatatctgtgagacactagcaaatcatcaaactgggcggggggatcgtggtagcctttgatttatagacagtcagaagtgcaggtgacaacttgaacttgtgattggcatctaaagtcggggtagggacagtattatgggactgagcccttaacctttgggatctgaggccatatccaaataggtggtatcagaattgagtttaattgtaagacacctggctgctatcagagaattggttggtgtggggaaaatcccatacattttgtccgaagtgttctggaagtattgagtgttgtgagtgaaagtatagaaaaaacacttgtctggccaggcgcggtggctcacgcctgtaatcccagcactttgggaggctgaagcaggcggatcatgaggtcaggagatcgagaccatcctggctaacacagtgaaaccctgtctccactaaaaatacaaaaaagttgccgggcatggtggcaggtgcctgtagtcccagctactcgggaggctgaggcaggagaatggcgtgaacccaggaggcagagcttgcagtgagccaagatagcgccactgcactccagcctgggcgacagagcaagactccgtctcaaaaaaaaacaaaacaaaacaaaaccacttgtacttgtctttccagtacagatatgtaaaaacttaaaagaagaaagaccctaggaaagaagagagaccctggtaaacacattttttactgctttttcgggggaaacaattttcaaagccctggataaggagtgatttgtcacttttctccctgtccccaactctctgaggtgctttttgaatataacctaatctcttggtgcctcactttcctcatcttcaaaagtaaaaatactaactcatagagtttttctgaggattaaaaagttatggaaactgcttagcacagtgcctggcacacagtaagcacttaagcagtttttactttaaaaattaaattcagagggccaggtgtgttggcttacgcctgtaaactcagccctttgggagatcgaggcaggagaatcacttgagctcagcagttggagaacagcctgggcaacacagggagacctcttaacaaaaataaaataaaattagctgggaattggcgcttgcttgtagtcctagctacttgggaggctaagggggaggattgcttgagcccaggagaattgaggctgcagtgagctgtgattgtgccactgcagcccagtctgggcaacagagcaagaccctgtctcaaaaaataaattaataaaataaattcagcaggattgtttttgtcttctttttttcttttctcttcctattttcttccaaatgtgctgtcctgttaaattattcagatttggcatttgaagaatgggaaagagtggtgcagtctacacagtgaaggaaaaaacaagaacgggaaggagtgggacatggaatatgatgtatgtgaaaatgtcattcgagggccagggagggtcttatgtctggattttcatactggggataaagtttgatgtatcccttagtgaataagccccaaaacacttatttctgttaaattgaacattttataaagaattatgtagtctttgttctgaactttaaaaaaaaaatgcttgtcttctcagttcttaagtctttaaattctgccgcaacttagcaggctttcccattgttagaaattaatctaacacacttttttttttctcttttgtatggcctccctaagttattattaagattcagatgttaatatttgtatgtggcttgcataaacagtttaataattttatataatcttctttttctttgtacatgtcatatttagatgggcgtttatttgatgtagtattaattacttgtgacttttaaaatcctgacttcagccaggcacagttgctcatgctttcaataccagcagtttgggtggctgagatgggcggatcatttgagtccaggagtttgggggcagcatggcaaaaccacgtctctacaaaaaatacaaaaattagccagccctggtggtgtgcacccatagtcccagctactccagaggctgaggtggaaggtttgcttcagtccaggaggtggaggttgcagtgagtgaagattgcgccactacactccagcctgggcaacagagtgagaccccgtctcaaaaacaaacaaacaacaaaccaaaaacccaacttcctatgtcattatctttgatttaaaaaacaaaaatcattacagtgcggtattactgaatatacttttatatgtagaattgtgaaccatgtgtctttcagagttgaaaattaattgaattttttgttttttattaggtcgacaaagatgctgaattagtggcccaatggaactattgtactctaagtcaggaaatattaagacgaccaatagttgcctgtgaacttggcaggtatggtttttacacttaatcaagatgagtttgttaagtgattttgagaattttgatgtgtaaatgcagttttccattcatcaagcgtggattatcccaagcaaatttgtgaggcataggctgtcgttccctgtctctgaacatagttctgtactcttctagtcagtttggtttatttaatccatggtttgaaaactgaggggctgggctgagcgcagtggctcacacctgtaatcccaccactttgggaggctgaggaggaagggtcacttaagtctaggagttcaagaccagtctgggcaatgtggtgaaaccccacctctacaaaaaaattaaattagccaggcacctggtggctggcatgatcctgtagtcccagctgttcaggaggctgaggcaggaggatcctgtgagtctgggaggttgaagctgtagtaagctataattccaccactgcaccccagcctgtgcaaaaaaaatagcaaactcaggggccaatagaagctaaattataagcataaacacatgaaggagccatgtgaggaacaggagagaatggcagggaatggagaatactggagggtccatgtgctgtccaaagcgggagctgccactcagttccagccagtttttacagctcaatggtgttggcctagtgattccacaccttctggttttaatttttttaaaaaaagaagaaatacgtacttatacgttaaatttcccaattaaaaaaagccttgttcaggttacattcagccttctgactgccagtttgccacctttgatttaaactaatttctggctggacccattggctcatgcctgtgatcccagcactttgggaggctgaggtgggtggatcacctgaggtcaggagtttgagaccagcctggccaatatggtgaaaccctgtctctactaaaaatatgaaaattagccaggcatggtggcaggcgcctgtaatcccagctgctcgggaggctgaggcaggagaattgcttgaatccgggaggcggaggttgcagtgagctgagattgcaccattgcactccagccggggtgacaagagtgaaactctctctcaaataaataaataaataatttccttctttgtatgctctggaaatagttgaaacagggttaaatttactttttaataattcagggtatttctcttatcaaatgtaaacgacttttggattgtgttcagtttattcttccttctttggttatttgaaagtcgcttgttgacataatattctaatacttactattgcagactttataacaaagatgccgtcattgaatttctcttggacaaatctgcagaaaaggctcttgggaaggcagcatctcacattaaaagcattaaggtaacacgagtgattctgaagtgctgtgagggtctgaacagtggctgaggtttattttatagaatttatacgccttaaagactgaactcagaaatttgggattccattcccacatggccatctaatacaggtatgatcttgagaggtcacttaaatctcaagccacgagttccaccatgcatacttcctacattataaatctgttgtaatttcacctgtgtgttgtgctttgaaaattttgatgttctctattaatgttaggaggcattatttttgtaattaagattcacctacttggattttggatttggaagatacttttgtgaattagataattttatggatcactgttaaatcacgtggctaccatctggtgattagaggttctgattggcagttaaagttctttcataaaagttgaaaaaacaagtttttttaataagggaaatttcttgagaggacacaactttttaaatatggtcagtggggaaaaaaacttggaaaggtaatgaagaatttgagaaccatcaggctagtcaaacccttcatctcactgtaaatgactcacttgaggccccatggctagcgaagtacttaaaccagaaccagatcccctaactcccagtctaaggctctaggttttgccttctttttctttctttctttcgtattattaggctttttgttcaaatgcttggggttgattataggatatgttcatttcaggcaaattcataattctgaaatgtagctaatgatagtgctctagaaattattctgattttagtggtcttttaccttgtggaagagaatttattcctgaaaaacctgtggtagtatgaatcatcttacatcaaaaatgtgataaacgattctttagtagttcataatgctatgattgggtttccatgtgcacatgtaagatgtgcctctctcaagccttgttgtgacatcagcacattacccatctgatgagaaaaaaaaacagttattgaaattaattcatacagttctatacttaaaatacttgtaatattcagttttatgtggttgaatatttaatggaaaaaaactccaagaaattagaacagtaaagaaaaaaagcatacaaataaaacaatgctaatacataagattgtcattaccgtcaattgatagtccacaaatactcggagcagagaactcagtgagacgtgctcattctcgaccaggaagctgatcgtatgaatggtgatttgcctttcaagacactcacctgctctctagagtattgaagtcaaaatggtctcattaaatatgaagaaatgcctcgaatgcaaaagtagagttactgtatcaaattccttataaagttgggaattcttgaaaacctgaatagctgtgtcttggagtgtgacagtattttctggctaatattctgccttagctcgttagaccgtggcctcagattttactgtctattcaatgattttatatatatatttttttgtttttgcttttttcaacgattaaataaatgtagatagtcagtaacatgaagcagcctcagagaggattcatcacagggagaaagcattcccttctgggtggaactcatgcagagctttctgttagtggagtaattttttatgtaagagggtacttttccttaagttaaaaagatgtggatagtagaaataactgatttacttgctagtcagtgaattgaaaaaaatcttgttttctgttttcttttttttttttttgagacggagttttgctcttgttgtccaggctggagtgcagtggcacgatctcagctcactgcaacctcctcctcccgggttcaagcgattctcctgcctcagcctcccgagtagctgggattacaggcatgttccaccacacccagctaattttgtatttttagtagagacggggtttctccatgttggtcaggctggtcttgaactcctgacctcaggtgatccgcctgcctcggcctcccaaagtgctgggattacaggcatgagccaccacacccggccttgttttctgttttctatatatggtttaatattatatccatgtttcttatggaccagaggaaagtaactgtgagggagaggttttgatgggaagggctggaataacaatttgttgacttacgtggttaaggcaaaggatgatctgtttatcaaatgaattgttaaaatattaatggtttttcccagaatgtgacagagctgaagctttctgataatcctgcctgggaaggggataaaggaaacactaaaggtgacaagcacgatgacctccagcgggcgcgtttcatctgccccgttgtgggcctggagatgaacggccgacacaggttagtgacggacctgggacagatgatgtgggaggctggaggaatactgccggttttggtggcagtggtgccggagcttagcagtcatgtggcttgctttctggtgtccttgggtttggtggcgccttggaggaaatggtgcttggtcatgagcacgttcatttccgtcagccattgctacgggacttccagcgagatccagcctggtctgcggccttccgttcttgaggtggggaaacaaaacctgaagtgaagtgggattctgaaaagttctcatgtgacgcttatgaaacctgagtttagttcttagatcatcttttcctgtgggacagaaagcaaagagcaaatgtttcctatcaagcaaatcccatttccttcctgttactaatttttaatttttattatgttttatagttttatttttatcctttttttttaagtagaaataaggtctcactttgttgcccaggctggtcttgaattcctggcctcaagcgatcctcctgcctcagcatcccaaagtgctgggattgtaggcgtaagccaccacgcccggccactaatttttatttttgtagagatagggtctccctatgttgcccaggctggattcaaattcctggcctttaacgatcctcccaaagcgctgggataacatgtgggagccactgcacctgattacaaatgccaaaagttatgcagtaacaggcagagttatagaacctgtggttaatcagtcaaccaaaggctcaaaaacatggtaatttgccttgaatttgtagctaacagattctctggctgtagcactgggaatcttatggttgagatgtgtgtagcaaatgtaagcaacctgtatattttcctctttaaaaaatacggacggttgaatgggttagtacatgctttttcataggatgtctcactaagcaaaagcgttaagccctttcccccacttttgagaagtacagtcatacctcggagatattgtgggttctattccagactaccacaataaaacaaatattactggaaagcaagtcacacaaaattttggtttcttagtacatataaaagttgcctttagcagctcacagtggctcccacctataatcccagcactttgggaggccgagacaggaggattgctagaggctaggagttagagaccagcctgggtaacatagtgagaccctgtctttacgaaacaaaatttttttttaattagccagccatggtggcatgtacctatagacctcgctacttgggaggctgaggcaggaggattgcttgagcccaggaattcaaggctgcagtgaggtatgatcatgccactgcagagcctgggtgacagagtgggaccctgtctcaaaaaagaaagttatgtttatactatagtctagtcttttaagtgtgcaatagcattatgtctaaaaacaaagtacctatcttaattaaaaattattgctaaagaatgctagcaatcacctgaaccttcagcgagtcatcatctttttgctggtggagccttgatgttgccttgatgtcgatggctgctaactgatcaggatggtggttgctgaaggttcgggtggctgtagcagtgtattacagtaagacagcaatagaatttgctgcattgattgactctttcatgaaagatttctctgtatgtagcatgtgatgctgtttaatagcattttacccacagtagaccttctttcaaaattggaatcagttgtcttaaaccctgcaactgctttatcaattaagcttatgtaatatttcaaatctatcataacaatattcacagcatcttcaccatgggcagattctgtctcaagaaaccactttctttgctcatccataagaagcaactcttcatccatttgggttttatcgtgagattgcagtaattcagtcatcttcaggctccacttttctcattctcttgccattctaccacatttgcgttacttcctccactaaagcattgaacccctccaagtcgtccatgaggggtggaatcagcttcttccaaactcctattaatgttgatattctgccctcctctcatgaatcacagattttttttgtttgttttttgtttttttgtttttttgagacggagtccagctctgttgccccgtctggagtgcagtggcacaatctcggctcactgcaacccccacctcctgggttcaagtaattctgctgcctcagcgtcccgagtagctgggattacaggtgcccgccaccgtgcccagctaatgtttatatttttagtagagacagggtttaccatattggccgggctggtctcaaactcctgacctcagatgatctgcctgcctcagcctcccaaagtgctgggattacaggtgtgagccaccacagcgggccaaatcacagatgttcttaatgacatctagaatggtgaattctttccagaaggttttcaatttactttgcccagatccatcagaggaatggcagaggaagcctatggcagctatagccttatgaaatgtatttttaaataagactttaaagtcaaagttccaccttgatccatgggctgcagaatggttgttgtgttagcagccatgaaaacaactttaatcttgtacatctccatcagagctcttgcgtgacctaggtgcattatcaatgagcggtgatattttgaaaggaatcttttttttttttttttttgagcagtaagtctcaacgctgggcttaaaatattccgtaagccatgttatagacagatgtgctctcattcaggcttggttcttccatttcgagagtacaggcagagtagacttaccatcattcttaagaaccctagggtttccaaacggtaaatgaacattggcccaactgaaagtcaccaggcacgttagaccttagtgagagtcggcctgtcctgatgctttgaatccaggcattacttctcctttttagcagtagaagtcctggatagcatcttctttcaacacagggctattttatctacactaaaaatctgttgtctagtgtacccatctttattaatgattttagctagattttctggagaacttaatgcagcttctccatcagcacttgctgcttcaccttgcacttttatgttatggagacgccttctttccctaaacctcatgaaccaacttcttccagtttccacctcttcctctgcagctttcttgcctctgtcagccttcatagaattgaagagagttagggccttgctctgggttaggctttggcttaaggatctgtcactgtggctagtttgatcttctgtccaggccactaaaactttcttcatatcagcaatacggttgtttcactttcttaccattcatctgtttatagagtggcacttttaatttccttcaagaacttttcctttgcatccacagcctggctaagtgtttgatttgagaggctggattttggcctgttttggctttgggcctgccttcctccctaagcttaatcatttctagcttttgatttaaagtgagagacatgcaattcttcttttacttggacacttaaaggccattgtagggttctcaattggcctaatttcaatattgttgtgtcacagagaatagggagaactgagaaggagagagatgggggaatggccagttcatggagcagtcaaaacacacacatttattaattgagtttaccatcttataagagtgttgttcctggcaccccaaaacaattacaaaagtaacatcaaacgtcactgagcacagatcaccgtaacagatgtagtaatcatgaaatcatttgaaatatttgagaattaccaaaatgtgacacagagacatgacgtgagcacatgctgctgggaagatgctgacacacctgccagatgcaggattgccgtgaaccttcagtctaaaataatcacaatatctgcaaagcgcaataaaacaaggtatgcctatatccttaatagctggtagtccagactgccctctggaatcttctgttaaacacacaacatactgaaaggtagcattttttattactttcattcaggaaaggggtggggcaaagcatctcgagtaagtaaaaatggtttcattgaactttaaacagcagtatttaatcctgagcattctggcacattggcgtctgtttatttaacaggtgtacatggacaccctctcagtgtgccaggccgtgttgcgtgtggcagactgtgcgaggggaactaactgtcctgttctgaaatggaacaacgaggggcttcatggatttggagagaagtacagtttagggtccaaggaccttttgcttttaaatattacactcttcttcaaataatctgaatttaaaccgcttagggctctcttttaaaccaccattggggtcaagtaagacatattctggggaaccagactcatttacctaaccatgtcccacttctgtatatgtgtgtgtatgtgtgtgtgtttgcatatatatatacacacacatatacacacacgtatgtatatgtttgtatttcaggtgaaagtcacataaaattggccattttaaagtgtatgtttcagtggcatttagtacattcacagtgttgtacggtcaccacctctatctggttccagaacatttttatcaccccaaaaggaaaatcctctgcccattacataggtactccccattgccagtctgtttctgtctcaatggatttacctcttctggatatttcatatgcatagaatcatacaatatgtaacctttcgtgtttggcttcccacttgcttttaagaaaactagctcaccccagaagaggaacttagcagaaacgagctccacaatggggtctcgagtaggagtcccctgcagcctgttgctctgattgtggcttcccctgttgtttctcctttggtttgctggtcagtctcttctcctttttctcttacccagtgaattgagctttgcttattttgactttgtccatctgttattgataagagcctccacacttgaaattgatgattggattagtttgtgtatggtcatcccttgatatgtgtgggagattggttccaagaccccctgtggataccaaaatccatggatgctcaggtctctgatataaaatggtacagtatttgcatataacctacacacatcctcctgtatactttaaatcaactcaggattacatatgatacctaatacaatataaatgctgtgtaaatagttgttatactgtattgtttaaggaataatgacaaaaaagtctgtgcatgttcaatataaatgcattcatttttcctcccaaatatttttgatccggtttggttgaattgatagatgcggaacgcatggatatagaggatatagagggccagctgtatttagtaaagtttgtataataaagatttaaatatatagaaaaatggaaataaactgttagtgtaataaaaacattgggcctttgtaaaaagaaaaatagcttcctaataatttgtaagtatctataaaataggattttaaaaattctaaacaacattcagtgaatttagtgcagtgttatgaactggattttggttaggccaatctgcgtctgctataatccctgggaaattagagaaaatttgtcctttggcatttttcaaggaatgcctaaagtgaaatatgaaagtgctttatgctgctctccagccgcggtggaggcattattcgttgtttgatgtttaatgctccctcccccacaccacacacccatatccacgcttctccacgcctctgcatatagacgtagaaatcgacacgtattcttcccaaactctcatggggtcacattatatgtatttaataacctctttttttctttctgttctgtccaccttggacatattttcacaaccttgaatacagatttaccttctttttaatagccgtttgggtgtttataatttatttgaccatttccctactgaggaacatgtaggtggcctccttcctttcctttttaccttgctatactacacaacttcctgagcacacatttgtacatttgcacacttgtgggcatgtttctgtaagaagaaactcttaaaagtcacactttacttgatactgccaaattatcttcctaaagtattgtactgtgttgtatccacctgacaacaaatgtgcctgtatcctcagtttccaattggatactttcaatctcttttttttttttttaaagcgacaagcgacagaatctgtcccagttacctaggctggagtgcagtggcgctatcatagctcaggccatcctcccacctcagcctccctagtagctgggactgcagggacccaccatcacacttggctaagtttttaaaaagatttttttttagagataggttctcagtatgttgcccaggctaatctcagactcctggcctcaagtgatcctcccattttgacctcccaaagcactggaatttacaagtgtgagccactgtgcccagccccaatctcctgaattactgcccgataggtaaaaaatgatgtgtcctggtttcaaaaggcatttcttttagcatttgaggttaagaatcctttggtctttatatattttttgtacgaactgcatgttagtcctctttggccatttttctattatagtgttgactattgctgtataagacctttttgaatattcataaaataagctctgaatcttatatttattgaaaatatttcctccctgagttcctgttcttttgacttttgatgtttgtggtttcagttttgatcttttttttattttggatataactgatttatttctttttttcctgccccttttctatgagaacgtactgatttttttaatagagtaaaatgtaactattttaatctttgtggttcttggcctttgtatcaaccgaataaatgtgaattgatcatgtgattaatacagtccttcccccactgggttatttctccaggttctgcttccttcggtgctgcggctgtgtgttttctgagcgagccttgaaagagataaaagcggaagtttgccacacggtgagttcctgacatgtaccatttgttccttctctgtagctgaggaaatcagatggtttagggtcctttccctccatttgttctttctgaaatcagctctcataagttgcttttctgcttccatggctcttggttgctggaagtgcagaatccactggcctcttgtcacctgaccactgcctgccagtccaggtcagaccacacgagggctgtttcctgaatgtgctgctgcctcagtttcctctagcagacctgctgtcctggagggcctgctcccccatgagcccccattccatagttcttacttcttccgtgactccctggtgctaaacctccttccacattccccaagcaccttgttttctcactcctcccatcgtaatgtaattgcgtatgtatgtgtctgcttccccaccggacttagtttttgagggtaggaaacaaggcttgttcatctctttatccgcagggcatattctctccagagcacgtagcgtgccctcagtaaatgctcgcatgggtggcgagtaactagacatgagagctagcctcagctcacgtggaggaaatactgatgctttgctttaatggcgctgctgctgctgaagccagaatgtgtgtgtgtcttgggtgtactgctggcccatcgaaagcgtgctgcttcatttaacgtcatggatgccggcagcttctgactgtattttcctgtatcaaccctgtttgtatttcattcccctccccactgtgttgttgctccctgttgtgaaagccagcagctttcactgagtgatggttaggggccatcgtctcttctaggcactgatctgtgggaaagcatactgaataagatccatgaaggcccttgccctcctgcatcccacattctgattggagagagagaccctcaagtagatgagcaaggcagaatcgattgtgaccgatgctaggaaggaaacacatgaggccatgtgatggagggagagaggctggcgtagtggtggtcggcagaggcatatctggaggtttgagctgagacccgaagggcacgagggagccagctgtgcacagcctgagtagcagcctcttcggcagcaggaacagcatgtgcaaaagctcagaagtgacagaggactttgcgagttcagtgaacagaaagtgtgagagtggagggctggtgaggggagtagatgagattaaagagttaggcaggggtcatctcatgcaaggcctgggggccacactggggcttatggatgttattcgaagagcagcaggaagccagaaggcagctgtaagccggatgggatgtgcattaattttgttctaaaaatcctagacgtggaggaggactgggtggctcccgttacctaggcccggaggcaggcagaggtgagtggggaagaggtcagtgggggcggtgagttatgtccagtttggggtgactatgaataaagccttcatagaatgaggagtctgtcttattaagctttcttttaagaaaagaaattcaaataaaacatttgggaattggttgatattcagccagaagtatttattgtggctcccgtattaagatgatggcatagattccaagggaaaataagatttggatgacatggttcctgcactcacggagattgcagtcctgcaggaatcatgttatgtgagacatcacactctattttgctttttgaggccaggtaccaaacagatggtaaagatattggcactaaggggccagagaacttttttttgtctactggtaagaaatggctttataaagggaggggcatttgttctgggcctcaaaggaagagcatggttattggttgcactcccggggatggagagattgctggtggtagcggtgctgctctggggaggcgcacagccaggtactgggtatctctgtaaggcgttgtctggcaggacagtgacgcccattttgctgtccttcagaccttctgcttgctttcaggagaaagtctccctttaatcttcgtacgtttgtaacactctcttaactgcctaagaaagtagactttaagctcagagctttggcaggcaggatctagcaaaactgtttggtattctctgcatttttatggtaacttgatatttatggcaaagagtactgtttctctatatttagcctaggaatataaagttaactgttaggttgggcacagtggctcatgcctgtaatcccagcactttgggaggccaaggcgggtggatcacctgaggtcaggagttcaagaccagcctggccaacatagtaaaaccctgtctctcctaaaaatacaaaaattagctgggtgtggtggcacgcgcctgtaatcctggctgctcgggaggctgaggcaggagaattgcttgaacctgggagctggaggttacagtgacccaagattgtgccactgcattccagcctgggtgacagagtgagactccatctcaaaaaaataaataaataaataaaaaataaagttagcagttaaaattaagcagaaacaatgggtagatttaaataaaaatattaagatattgacagtacagttggcaggggaatggctgaagtttgcaaaacactgttgtaagtcctgctgggactgtgattggttagtgggggaaagaaaggcagcagcagtgctcatggggcagaagcagccgggcagccatactgagatgagtggcaggtgtgatcgaggcctggtcctgtcaggactgtggggtggggtacaggagcagggagagaggccgaggtgtgagtcggactggattggggaaaccttcgaatgccagaaggaggagcaggagttctagttcttaagagttctcagaatcattttaatgggtcaccaggtttgggggacctactgatctaaagcaatccagttttttcttacgcccataatagtacccatctgttagatgggtgcacagttgtcctttgcgttggttggcctaaaacaatcatactaataaccatgatgacacgtatgcagtaaaacctcactgtctgccgagcttcacagagaagctgattctgttgcatggaaatacagcgttacaagggaactctgagattatatcgttggtgcttgggaagttttactgaaagctagtaagctttcaacagtctgtaccttgcacttcaagagaagggaaggaagcaggaggaaagaggaacagagccacgtcaggattgcacaagggacagtagagaccaggtgacgaacaggagcgagcgtaggctcctcccggctcctcgtggaggccaccttggctgttgcgactttctgcagttatgacagggcactggttgaaattcaggaatacctcaggaaattgtcttaaagatacatctgttgccaacaaagaatgaacgagataatgaattatttttacttttatactgtacatcagagttgcctttgcagaactgtgttgaatactctgtgctagtttgttggggctgctgtaattaagtacccaagccggatgacttaccggaaagtcattgtcttatagttctggagactaacgtccaaaatcaaggtgtcatcagggttagtttcttctgagggaaggatctggtccaggcctctcattggcttctagacggccttcgccctgttcacatcatcttccctctatcatgtctgtctttgtgtccacattttcccttattaggacaccagtcccggtactggattagggcccaacttaatggcctcatcttaactaattacatctgcattgactgtgtttcccaataaggtcacattttgaggtactagggcttggacttcaacatatggattttgcaggggggcataattcaacccataatacacaatttagaaaataaaatcatagagcgtggggccagacatggtggctcacgcctgtaatctcaacactttgggaggctgaggtggttggatcacttgaggtcaggagttcgagaacagcctggccaacataatgaaaccccgtctctactaaaaatacaaaaattagctgggcttggtggtgcatgcctgtagtccgaactacttaggagactgaggcaggagaattgcttgaacctgggaggtggaagttgcagtgagccaagatcacgccactgcactccagcctgggcgacagagctagactctgtctcaaaaaaaaaaagtgccaatgtagagtactggagttgtgatccgtagcattggacttgctacctctgtggcttcatttatgtaggctttgtagataggtgaatggggtgtgtggatgttttaaagttagaagtcaaaaatatatatactcacactgtctacctgcttttcatggagggggtggagtagaaagagaaaaagttaagttagggaaaaggagtgtcgtcagaagtggtcagtgcagctgattctggttttcaggctttggccttcttcagagtatcttaggtttctgccatctttatagtctttgtgaatatttagcctcaaggaatcagataagacacagcataggcagccttaaactttcacatgttcattttgttctttcactctacccatcaacagactgagggtctgataaggagagagtgagcctaggcttcttgttctcatgctcacggaagctgctgctttcccttggcctccctggcctgtcgcagctgcctgtctcagcctccctgcctctcggcctccctgcctctcaagcctccctgcctctcggcctccccacctctctgactcttggccttgttttccattgctgtccccactctccactgaagcccagtctcaggcttttacattccacatgcatttagtgtacttttattattctgctttatcctgctgttactgaaatgatttttttttttagatggagtcttgctctgttgcccaggctggggtgcagtggtgcaatcttggctcactataacctctgcctcccaggttcaagtgattctcctgccttagccacccgagtagctgggactacaggcgcccaccaccatgcctggttattttttttttttttttgtatttttagtagaggcagggtttcaccatattggccaggctggtctgaaactcctgacctcgtgatccacccgcctcagccttccaaagtgctgggattacaggcatgagccaccacgcctggccatactgaaatgatttgttcaggacatgtcttcattatagcattaagcctgttgggggcaggtgtttgtttcaatttgtgcttctttgtgtgacgtaaggtcatgtagctacctgggactcagtagtcacactgcagagtgtagctgcctggtccaaatcccagccccactttcccagctgtgtggtcccaggaacatcccatcatctccctgtgcctcgattttctcatccgttaaaagtgtcagccattcttctgagcacttccccacccaggagcacccatgtcctcctaacggtgctggtgggcggatgcttttacagggcccccttcacggtatgtgactgggtgtaccacgggttgacattggaatgaagtgaaggcaggcttatgttttaagtaacttgaaagatgtaatcttttttattgttcctttaatggggtttacattcagttgctattgagttataaaataccggggacataatcgtggctaatctgagctttctgaatgaacagcctgtcagcatgtagccagctatcgcctttgggggcgccgtgtttgcctgtagaaatgtgtgggaaggtggtggtgggctgtcatggggctcttgtgttctttttgaaagtcttaatattttccatatgtgctttccttggattagatatccaaggggaagaaagatttgtttaaacaaaggtgttacttttctgtggttccttgatgtttgatttgtgggatctgtcttccaaatcccttttccttctgtctagcaatgatgttttcccagggctatttcacacagtgacttgacttcatttctatgcgtgggaagcttccatttactgaggtgcttacactttgcgttggaattatgtttctttaatttcctctcctctggttcctgtgttcccatctttaaatctcttgtatgttgtgctgtttaattgtcacgcacttcagtttcatatgatgctgtatgaactcttttagagaaggaggatatatataaagttctccacaacagcagcggcagcagcaaagtcgtggactttctaagggaggagacccagatctgtgaatagagataatcatggccattcatgtctcagatctgtgctgttcagcatggtacaattagccacatgtgcctatttaaaggtaacttaaggccgggtgcggtggctcacgcctgtgatcccagcactttgggaggccaaggcaggcggatcacctgaggtcgggagttcgagatcagcctgaccaacatggagacaccgcgtctctagtaaaaatacaaaaaaattagccaggcgtggtggtgcatgcctgtaattccagctagtcggcaggctaaggcaggagaatggcttgaacctgggaggcagagattgcggtgagccgagatcgtgccattgcactccagcctgggcaacaagagtaaaactccgtctcaaataaataaataaataaaggtaacttaatttttaaaaattaaataaaaataaagattcacttttgtagtcgctccagccatgtttccaatgcccaggagcccctgtggctgtggtgagcagttagacagctcagctgtggaatgtccaccatcacagaaggtgctaggagacgacatgtcaagaccgcagacacttggggcaccctttttaacaagctgtgttttctactccagatgagctctgttttacccagagaaatacactcttcattatttttctaggaccgccagaatagggttacattgcttgcagccaatgaggactgtttcagataagcatattttcattttcactgggagtctgttctttcttagtatctcatacacagtagtatctgggtcttcaaaacaggctgtgtcgttcttattccagcttgagcctggatccaggtgtttggagaatttgggttttcagcagctttttactgaagcatttggccttctaagtgcattgctatatgtcaccagtggtagcttgagtttttttgtcttgtgatttctttcccaaagctataaaagtggcctgtaatcaatagtaaagtcttgtcaatagcatgtttctgaattcattttaggaatagtttgtatcaaggaatcattttcccacttctttggttcaatgttctcttgtttcaagtcaaggaaacagaatgataccagtaagaaagcaaacactccctagcggttcagtctcatattgaaatgactctgctgttgaaaatgccagtgtggctctataggaacttctgcctgcctcagcacttgaagtctgtgccgccgctctaagcaggtaaccacaagcgggtctgtcgagggttcgaatttgttggcaaacagagaaggcgactgaatgagccacggcaggtctcctggtccgtatacgcagatgtcttcgacgtagcggcctgcagaaagaaacacaaaaacctagctgcctttgtttcctcacccattttattcacacacagaaagtggcgcatgctccgtccggtgtcagtggtgagcctcagcttcaccagagttcacatcaaacagcatttccatgattgccttgacaggggcttttatgttgaattttgaacttacggtggaaaggcgcactttcattcttttagtgatttctgaaatctttgttagttactgctttaggtgaataccatgggatttaactcaccacgcgcacacgagagataagctagcgctcatttgcctgctaaaatctcagttccgatagattctgagttccatgaacttctaagtcttttcattggttgtaagtagttcataagaatggtatggattttaaataagtcattgcttctatattttttggggaccccagacatgcaccaccatgcccagctaatttttgtattttttatagaaacgggatttcgccatgttggtcaggctggtctcaaactccagggctcaagtgatcttcccacctcggcctcccaaagtgctgggattacaggtgtgagccactgtgcctggcactgctttttatttgtttttcagagtgaacatttgatacaaacattgaggtgggaattacaggccaggcacggtggctcacacctgtaatcccagcactttgggaggccgaggcgggagaatgacttgagcccagaagtctgagaccagcctgggcaatagagtgagatctcgtctgtaatttaaaaaaaaattttttttaaagtgggaattagagttggaatccagtggtgactggattccttggagactcagtgacactttttatgtgcttttgacaaccgtgtttggctctttctgctcttgcttttaattctcacagtaacactctgaagtggattccatcatcattcccattttgcaagggaggaaacagattagcgaagtgaggcctcagcgtatgtgtgagagggaaggaggtctgtttatttcagaaacgttgctctttctctgcccagctccttcctgctctctttcctcacaccagcccagtaatcctacttttaaaaaaacgtatcttggctgggcgcagtgggtgacacctgtaatcccagcactttgggaggccgaggcgggtggatcacgagggcaggagatcaagaccatcctggccaacatggtgacacctcgtctctactaaaaatacaaaaattagctgggtgtggtggtgcgtgcctgtaatcccagccactcaggaggctgaggcaggagaatcgcttgaaccagggagtcagaggttgcagtgagccgagattgcaccactgccctccagcctggtgacaaagcaagactccatctccaaaaaaaacctatcttaaggaaatactgtttttaaaaggggcagggggatgtatgcacaaaatgtccagtgttgtttctaagactatgtaagtggcagctgttaccatgatttaacaaattttacctgatagacatatttgctacaatgtgctagaatctcagtagagttacatttaactactttaatattataagtatgggccagatgcagtggttcatgtctgtaatctcagcactttgggaggccaaagtggtaggatcacttcagcccaggagttgagggccagcctgggcagcatagtgagaccccatatctacaaagataaaaaattagctgggtttggtggcttacacctgtattcccagctacttgggagactgaagtgagaaaatcacttgagcccagaaagtggaggctgcagtgagctatgatcataccacctgcactccagcctgggtgacagagcgagaccctgtctcaaaaaaaaaaaaaaaagactacaaatatgaagactatcagtgggagaaacttaggacataagtgaaaagcaactcagctacaccttgattataatgatacagctgtgccatttagacacagatgaagttgaactagaagggaatacaaataaatggaccattttcagagctgtgttaatgatatttgagtgattaaaaataaaccctttgttgctggttctaatgggatagctgttcttctgcatgcagagtcggactgggagcttgcccattgtagtggtggcaggcggttgctcccagtctgagccccagccctgcccctcctccctgtgcctgtgggagtgacttcacttacctgagccttgggttccacatcagtaaagggtgaataatgattgtttctacctgagaattgttgtgaggattgagtgcaggcccaaagctcggacccggaagatttaccacctccctacacaccagggcttggcctacttagggtgctgactctgaatgctggccatggatggccacgctactgcctaactgtgagtaccgttttcatactgaagctagtgatgttaagaactttctgaagtatttacttttagggaatgaggactttgttaggatttatactaactagggtttttttcaaacattgttgaaacattctgatttcattgagaattctgaatcattactttattattgatagtatcaaccctttatgacttcttataccatgtgcacacctgaggggctcctgttttcaggaagaatctgagccccctgctttttctgagcatttactgactagtcctgacaaacccaagtgtgtaatgacagggagcccctgctttctaaagaaagggcagagctcttgttaacctgttgtttacctgtcacctttctaccatgtgaatggatccctaattgaatcatatctgcttttgaaaaaaccccttcactagaaaattgttccagctctctaacctggtccctctgcttcaggagggtggctgtgcacattggcagcaggatttacttgtctttgaactagtctggtatttgatttacattttttgtttgtctccaatctgtttattttaggccagtcttttaaacagctgaaaaactgggtaaacctagtttatttttaatatctagtctactgtattcaaacccaaggtctctacccaaaatcactgttaaaatcagttattgtatctctgtgcagtagttcctgccactgggtaggaagctgtgtggagacatatggcagggcctagctgttggtgcagagggtatatttactttgggaaattttatcaacctgtattttttgtgatttgtgtacttttctgtatgaatcttatataaaaagtttttttaaaaaattgactcaacctatactaattggatcatcactaattccagattactttaaacatgatcctccgtcttgcccactaggattgaggcagcagttttatagttgttgtaaaatttgaagccttttttgttttgttttgtttttctttttacctttacatccatcatgaacatttccttcctcacttttccgcttaatggctcgaacatttccttcccagccagcgtttggtgtagcacctggagcatctaagaggaaaacaaaaccagcattcagtgtggaatctgcttcccagttcttttagtacaagttcttctgtgctatcatttccatttcctctagatgaggtagtcaatgagaaaagtagaggggaaagtccaaccttccttgagatgtttcacttgtaacatcggatcaaaggctagtgcttttgggggtgggagcatgtactacgctggcagtagcatccaggtggaccaaggttggggatccccatctttgtacttgggtttcatttttcagccctttctccaccccttgttactcccttgctgtatgcagagtactctttgtgattctcttggggttctttggattgttttctctgtaacagccctcggagattatttgaaaatcaaacttgcagtggacatgaaattatattaaaaaaaccccaaccaatgtctactggactcatcgtacaccactgtctaggctgattagcttagttgttcaggcttgaagccacactccctatagaagccagtccaccttttacaaagagaaaatactgaagtccacttaaggatggtatctgatttccctctacctctcagagaacccatctgaagtatcagatttgccacaaaatcattactagctttaacattttccatcttacagagagcccttagcacaatgcctgacaccagtaggtatccagtagtatttataaaataaatgaagaactttctaaagatttatactcagaattttccaaagtctcaggagatgcaaaatgccagtacttctttctagagagggaacaaaagcagccagactggtttgggaacatctttcagctaacttcagacccctaaaatcagagaacttcctgtttccctaagtggaaggtcttgcaaaatgtagaacatttacaaggccaaagaaacatagctgaattgaaaaaatgttcaattttttcaataaatcttatggccgggcgtggtggctcacacctgtaatcccagcactttgggaggccgaggcaggcggatcacctgagatcgggagttccagaccagcctgacgaacatagacaaacactgtctctactaaaaatacaaaaattagctgggcatggtggtgggcgcctgtaatcccagctactggggaggctgaggtgggagaatcgcgtgaacccgggaggtggagcttgcagtgagccgagatcgcgccactgcactccagcctcggtgaccgtgtgagactccgtctcaaaatcagtcagtcaatcaatcaatcaatcaatctatctgctgctgttgctgctgactgcacaggcatccatatcggtgggtctttcttaccttttagtcggttcagggtcacccagtagtgttgctctgggctgcggatgtctttggaccactgaagcatgtcttttgcatggatgtcagtcagtatgaactctacaaacttccttgtaagtacatagtaagcacttccaaaataaatggttaagttatggggtggtttgtctttgaatctgttatttggaggtgcatagatacttcctttaggaacgaattcgagatgactttgacttgtcttggatttaatgtgcaatggttggattactccaggagtaatatttttatcactccatttgcttctgatgtagtgtatgatttctctgttggttttgatgggaaaatcctgtccacaaagattgatgacatagttccattgaaatttagaatgcactagaactttcatacaattaatatctgcctgtagtcttgtaaagccagcataagccaccttctctgtcttggaggaaataaaaacgttttcaaaacagttaaccaaggtttgcacagcagtcttatacttcattggggccttttcatcaacatgaatacaataaacattttgaggtacataaatagctctgagaagctgcacaaacatggccagctccttatgaatagttataatatatgccaaagagaaatcgccctcttctgcagacaggggtctggttatgaaatgcagcccccgagaaatcctggagcagtttcctggtgtgtgtaaatgagcatgtatttcagatttatgaggggttttgcaaaattttgcaatttagggggccgcccctttcccttcaaataaagcggaacacagttcatctgggtaaaagccacattctactacttctggttgggcaggttcttcttctgattctgcaggagttggattccttaagtaaagaaaaatgaagatgcaaatgactgccctcacgacaagtccagactttgtggctcgaagctggctcatatcttgagctccaggtgcattcttattaccataatttaagtattttttcctttaagcttcctaaaagaacaacagatacaatttagggtgttgtaattctcccccccaactttattgaaatacactaaactacatatacacacccatgaaactgtcattgcaatcaagataacaagcatttccctcactcttcaaagtgttcttatgctcctttttatcctctttctttccatccacatctctggcaattgccgatacgccttctgtcactctagtttgtcagtgtgtaactctttaagaaactgccaaactgttttccacagtggttgtaccagcaatgtatgatagccatttattatatagcctctggcatacttgctgtggtcagatgttttaatttttaccttttaatgagtgtgtaatgttagttccctgtagttttactttgcatttccctaatgactaatgatgttgagcatattttcatgttattgcccttattagggagatgaaaaatctcaaatacttactttggacatagacaccgtcctgttctgccttattcaaagttcattgtgtgccattattctgcatataagactaatctttccaacagaagaagtgacaaattaagaggaatttgatgattatacacttaaacctgttgaagtgagtttctgggccaggcatagtggctcatgcctgtgatctcagcactttgggaggccaaggcagaggatcacttgagcccaggtgttcaagactagcctgggcaacatagtaagactgtatctctataaaaaacttaaaaattagccacatgtggtggtgccctgattatcccgttgcactccagcctgggtgacagagtgagaccgtgtctcccaaaaaaaaaaaaaagtttctgaattatttttaggaaagatgtcatagattaaaaacaaggtatctttatctaataacattatttgataatcatgtagttgtttgtcttgagtctacagaggtacatgaataggtgtagcaatagcaaaaagtgaccaaaaggtttcagttaattaattattacacgcaaggatcattctctggaatttagggaagaagattgataggtaacatgtcaagctttatattgttagaaagtatttgtttttcttgtttatgaatcttgacttggtttccattaaaagttgcatgttattcctacttcctgtttttcagaagaccatgtacgtgtgactggtatttgagctcaggttggacactggtcccttgcctttccacatcatttttacaaatgctgtttggataatgcctcaaacaggcagcatttttagttatccttgtgttcttaaactctgagccaacaaaaactgttaacattgactgtggattttaaagatgttgtatttattttcatcgtacagtttatttctacccatcatgcttccaaaataaatagcagccactgccgaggtatgtcaggccgcagtgtgttccactggttcagtaaatggtttctgccccaaacatggaaccttacagcctaatttaaagacattcttataaattatgtaatacttatcttttttttttttttttttttgagacggagtcttgctctgtaactcaggctggagtgcaatggtgcgatctcggctcaccacaatctccgcctcccgggttcaagcgattctcctgcctcagcctcccaggtgcatgccaccatgcccggctaatttttgtatttttttagtagagacagggtttcaccataatggccaggctggtctcaaactcctgacctcgtgatccacccgcctaggcctcccaaagtgctgggattacaggcgtgagccaccacgcctggcaatacttatgtttataaacatgaaaccatcataatttatacattttatatgagatttctaaattaaattaaacctgaccatagaaattgaataggaaagaaaaatgttcttgaaatgaaagtaaagctttttactacttctcctataagaattttgattaaagataaaccagataccatagtttgtcatatcttcccctgtattatgactttagtataggaagaagggtttgggttttgtttttttttttctgttgtccttttattttgttttttgagacagggtctcactctgtcacccaggctggagtgaagtggcgcagtctcagctcactgcaacctctgcctccccggttgaagcgattctcctgcctcagcctcctgagtagctgggattacaggcatgtgccaccacgctagctaatttctgtatttttagtagagatgggatttcaccatgttggccaggctggtcttgaactcctgacctcatgtgatccaccctccttggcctctcaaagtgctgggaatttttaggtgtgaaccactgcgcccggcctatttgtttttttggttttctgttgttttttttttaggaggagtttcgctcttgttgtcaaggctggagtgcaatggcgtgatcttggctcactgcaacctccacctcctgggttcgagcgattctctggcctcagcctcccaagtagctgggattacaggcatgcaccaccacactcagctaattttgtatttttggtagagatggggtttcaccatgttggtcagcctggtctcgaactcctgacctcaggtgatccacctgcctcagcctcccaaagtgttgggattacaggcgtgagccacctcgcccagctagtttgttgtttttaagataacttgtgaaagcgttctgttcctcctgtcacagaagtgagttagcccctcatcactgccaaatgataccccatgtaaatttggctgtgcgccgagcccaggagattgggtattttcagtagtttataataattaaatgaagagaggccccaagggtagccattgtcctttgggaaaatacccaggctaagagtttttccctcccctgtatagagacagggacatggccagttcagtgttaacctgctgtggccttctaccttggttccatcagcaccagctttcactgtggcccagttaaatcttccctctggcttagattcactgtgaaacttcagaatggatgcctgctggactgccctgctgagtgggaaccaaggtccccagcagtttagtttgtcattgtttcaacataaacttttttttgagacaaggcctcactcttatcactcaggctggagtgcagtggtgtgatcatggctcactgctgcctcaacctcctgggatttggtgatcctcccacttcagcctccccagcagctgggactacaggcatctggctgattttttgtagagacaaggttttgccacacaagcttttttttttaaaaaaaatcttttaaaaattgatacataataattatatatgtttatggatcacagagtaatgtttcaatacacacaatgtatcagcacaagctttttaaggcagtcaggccctctattgtaaatgtagcctttggagatctcactgctgttgctgtcacttgaacataacatctagtgggtaatatgaaaattcctggaggaataaacttttcatggcctgactttttttttttccttttaagataatggtgaacattattttcagttttgcaaacatttcctagcaattcttagtttttgttgtggctgttttatttctatattgtgaagtcagctattttaatgaaaaaataatgaaggtttagttactaaacatgagattttctgtcactaaattaatttccagtaaatgtaggtgctattttgtaagtgcggggaatatgcctctcataaaaaagtgttcttactgagtttttgaaccattttttcctccatagaaagatgtttaagatacttcttgtaaaggctgtagaaagagtggctgttaccctgtgtattatgtatggagtaggtatgcaagttctttgtctggaacagacctatttttaacattccagtgtcctattttccttgtgtattactagatcacaaacagtttctaaaatttgggggttagcctgggcgatgtagtgagaccccttctctaccaaaaaataaaaaaataattagccaagtattaggggtcccaaaattagccaaacctgtggtctcagctactcaggaggctgaggtgggaggatcatttgagccagggaggttgaggctgtagtgagccgtgatcatgcccactgcactccagcctgggcaacagagtgagtgagaccctatctccaaaataaaataaatttgggggtttgtgtgtgagagcatttcaaggcttttttcgtgcactgtctttccttaaattgtctttcctagacctggtatattttaataatcttttagccctccatatctgcagcctttgaaaggtagcattgttaaatatgtatatagtgtacagtggaacaaaacagcttccaagccatgaataatgttaaaagttaaccattcagttgactgaagccatctagcatccaagagatacagtagagtatctttcagtggaaatcattgtcaaacttatggtcaaggatggtggttaacttttttcccgtttatgtagtgccagaatctgcacaagaacaggaatgatttccagttataattctcagagtggaattattttacattttatgtttttgtccagggttaaagtacttccagggagttgtttcaaaacacattgctcttctaattagagccagtgcctgtgttctttttttcttgtaattcttctacagtcttcctctcccgactcccaacaagccttcacagccagtagcaaaagtcagcaatatgggtttgatatcgcattacctccagaacagttcgttgaaggatatagtctttgagaatttgttaggatgggatttcatttgtggtaaagactttttagggtgagttggcagcatcccatatatactctttcgttgcattttttatatgtatatattttaaaggaaattcctatgagtaaatagataatggatgggaacctttaaaggtgaacccgaagtattttgccatatattctagcatattaccattttaaagcattaacattaatttaaccagcataagcagttgatttagcacccaaagtttctgagagctttacttttcaaaaagggtgggggttgagggaggctcaatattgcatttaccttattaggaacctcatatttagcttcaggaaatgggctttgaatcagggccccagtgttaggctcacagccctagcacttacgagtctgttgggcaagtgacggaagctcctgagtgtccattttcttgactgcggatgtggtgtatggtagtgtctgcctcacagggacactgggaggaggtgtgggagtgaaggatgtgagtttcacactgagcctggccctaggaggtgccctgtgctcactggcactcaccctcggggtaatgcggccccaaaactgtaactgcaggtgctgtcttcacttgtcctaaagtctctgtagccacacattgaaaatgtggtgtctctttctctctgagctcagaatgctgtccaaagcagcctcaatgttagcacaatgttttcttgagttacttgagatgagttggacaaattttgaattcaaaagctgtctaactgtccagtgaaatggatgcctttcacaaaatgcctattcctaaaacatgtataaattattttagccattttgatggaaagaagaaaactttattttaggatatccactcaaaacaacgacaagaaataaaacattctagtttacaaaatgagagctgaggatttgcacgtggccttgaatctgcctctcatgtgaggggttaacaaatggtagcattttatatttaaaaatctagttgatgccatactgggaaaatattctacttttattttctttggcttaaacaaaaagtgggggctatttttgagagaaaaagacacctgcaacaccgacatttcaaatattactcatattctaatattttaaaaccacagagcaaagaaaaacataatttacttcaaaaagtatacctgtggccaggtgtggtggctcacacctgtaatcctagcactttgagaggctgaggtgggtggatcacttgaggtcaggagtttgagaccagtctggcccaacccaacatggtgaaacactgtctctaccaacaataaaaaattagctgggcatagtgatgtgtgcctgtaatcccagctactctggagcctgaggcaggagaatcgcttgaaatcaggaggcagaggttgcagtgagctgagattgcactgccacactccagcctgggtgacaaagtgagaccctgacacacacacacacgcacacacacgcacatgcacatatacctgcttaacctttgccattggtgggtcctgcatagctattgagacgcttaccaggagaagccccctggttcctggagggggagtcctggcggtgtcagggcccagcctggcctttctctcccatcggttcctccccggcagcggcgcctgcttcagtcacttgagtagagttgcttggcaggttttgttgccatctgtccctggagagttttattcctgttggttctgacctgcagattgaaaagttgctgcttttgcttctctgagtatttccttgggaccagatccttcctgaaaaacaaaatgagacaacagaagacgcctgacccagatgaagggcgcacagtcactcacattgagaaaactgcaggatgaaatcgtggcattcatgggtcagcgtcttgaaattattttaaatacaggaggcatgatttagttatcagaccctctctcattaaggagataaataaaagtcacttaaaaatcctgtttctccataaatagcattcaaaaaaatccagacattttacaaggcaggggctgagccttctctgtgctctgtgtcgcccccaagggtgagtctgcgccatagcatgtggtgaaggtggggtctgactgcaccccttcgctaggctttcctcttcccttctttctccacctctgggtacttttcttaacatcctttccttttctggttttaaaggttctctgcttgctggtactctctgcaggcttgccacagacagctctattaagaatatcggcaccaagagacatagatcacacaccgtagagatttcttatcttctatgtgccttgacgcctaagcgggatgtgtggtcagatgaatacagattctcttcacctgctcatggggtgcctctgagacacatgctgcttttttgcagaacagatgttgctgttgccaaagcacagagtattagaaaaacactgagcagacagaatgtagtccccataatcttcaggggttgtggcattcatgtggccttccagtggggagaccccatacattttgtttgtgtgatgttcagagtccgtgagttaaggttctgatttgatctagcaagaatcagaaaaggttaggtccttttatgtgtgggagagtcacattgccagcttgtgaggtcttgctgtgcctctcttcccctgcatcttgaatgcttgttttgaaacatgtccttgctgggtgcagtggctcatatctgtaatcccagcactttgagaggctgaggtgggaagattgcttgaggcttggagtttgagaccagcctggaaacatagcaagaccccgtctctacaaaaaattcttaaaaattagccggatatggtggtgcgcacctgtagtcctagctacttaggaggctaaggtgggaggattgctcgagtccaggaatttgaggttacagtgagctaggatcatgccactgcactgcagtctgggcaacagagtgagatgccatctcataataataataataataataataataatatttgccctgtgggtgcacctggactagacggcagatctgctcacactggcccattcctgggggtcgagggttggtgctgggtttcacttcttgtctcacattctacatctggaaggaggaagccattctaagccaaatagcagtggaagaagcaactgaggaaatgctggggagtgttgcccacattaaacgttacacttccacattgctgcgggaaatgccaacacaagaagcaaacatactagacgagctgagccacccatttctattggtaataaatggacaaagggtaaatcggctttatgtataaacctcttatacagattgactaaaacatttaaaaaatgaaatccctaataaataaaaggacatacgatataatttacaaaacaggtgtcgtgaatacagtggggtttttttatgtttcttaatccaagccaaaaaggagctatctcccttgccattcagattagcataagttttccttcaaaacatacgacgtgatgggcaccgtcacgtatggggatgtatattttcatgcaagcttttgggagaactgcttggctttaaaatctcatctccttttatactactttgaaatatttccttaggctctgttcttattcattcattcagcagttattcactgtgtccaatgtgggcagaaccctaggctcctcccgccatggaacatgaagacaaaatgcttcctgcttggggctaacagtgtagtggaggaaacacactgtttcaaaagtcagtacaaacatgcagacatacactcatttactctaagccatggggtactgcacaggaaacaaaaacaggattccgtgataagagaatgaccatgtctcggaagtggaattcctaggtcagagatgcatgcagtcagctgttcattgctaatattattgtaagcacaaagattgggaagccactgttccatttgttaaagtgatataaatatctagatacattagcatattgctcctaatttgaccactgttcccctcttggcacttcccctactggcctttttaaaaatactttaaaaaagcatccagagggcatatgaatataaatatacaattactagtttgctttttcgtttaacttatgataagcattttctacattgccccaaactctaaccatataatcttcctttttgggaatgtattataatttttttttttgagagagagagtctcgctctgtcgcccaggctggagtgcagtggcacgatctcggctcactgcaagctccgcctcccagcttcacgccattctcctgcctcagcctcccgatcagctgagactacaggcgcccaccaccatgcccgactaattttttgtatttttagtagagacggggtttcaccatgttagccaggatggtctcgatctcttgacctcgtgatccgcccgcctcggccttccaaagtactgggattacaggcgtgagccaccgcgcctggccgtattatgatttttttaaccatttcacccattctttggacatctgagtttcaagcgataaaaaggatgaagatacagttttaaatggatgtataatttctaccgtacaatagcagtactcaagaaaaatgcattagcaggaagatatgggtgattttctgttggtataatacatattatttactaaagaggtggggagcaggtccctgtggaccagctgtgactttgcggcagccccactccccatctccgcagtagcccctacccttgttttccctcatccttcagggatgaaccactgcactcaggtctctcgggtcaagcacctacccagaacgagtgatggggcccctagcagttgggaggactctgcccagtctccaggggcaattcctaccaaggttcaagccattgaggcccttgagggtgtgggtttggtgttaatggatcttttgaattttcgagagaaagagcaagattactcaatttctaatgtgaggggttcctgacttcttattgtcagtggccaattcaactttaaaagtacaataagtctgggcacaacacaacacaactgtatgcagaataaggtccatgtcctctgaacagtctgatctagaggaaggagaccgcttaccccaacactgtcggaaggaggggcagcaaggagtgatagaaagaagcagcagcagaaacccaggaggagagaaaaagaaaggtgggggcagcacccacagggagcagacgctgggttcctccccacccctgggccctttacgtcatagccacagctccaggccccactgggccttaactaccacctggttctgttcctgcagattctttttcattccaaggaagagaccatcttccagagccaagggaaagctctactcagacctcccatagcgtgagacttcccagggaacctcctctagcagagcaggctgtccctcctcctgtaggcccagctctctacagtgatggctaaaaacaagctccttttcttcaagggttgtaccagttaaatgctagattgggcacgtgcttcagtcattcatataacttctctatggcaccaccctcagggatttgtgggtcaaaaaggtatcttcagtcacgaaaatttaccagacccaccctagaaaaaaagctgatcttaacctgaaaatcactgttggagacaagaaccacattaaataacccagctaaggcaggggctgaggagagtcagcaaatgcttgttggtatcttctgtgcatttgggagattctggaaaatctttggcaacttcaggaaaaaaaaagtacttttatggcttttcttgtgctgataatgttttctacaaaagagattccgggcatagtatgtctgttattgctctgggcacagtaggtctgttaaaattactgttccagttgttgaaagaattttgttattatttggttgcctgcctttatgtttttcaaaggcagtgtcttatggagtaactaaatattttagttaataacagaccttatctggcatacttttaaacatctatgactataacatttaatagagtttttcatagatattagaaagataaattttggttgatccactcaatatgtgactctttgaagtcatgttacctacactaatcaagatagtgtggtgctggcatgagaacgggcatatacatcaatggaataaaatagggagtccggaaataaaccctcacatgtatggtcattgatttttgacaaaagggccaagtcaattcgatgggggaaagaatagttttttcaacaaatagtgtggggtaactggatatccacatgcagaagaatgaatttggacccttaccttacattgaatgtaaaaataaactcaaagtgatcacagacctaaatctgtaagttttagttacaaaccacttaggagaaacgcaggagtaaatcacaatcttgggttaggcgatgacttactaaatatgacaccaaaaacgtagcagtaagagagaaaattgctaagtccaatttcatcaaaataaaaaacttttgtaattatccagtgtaagatattttgtcataacagtcttggactaagacagaacttatatccagaatatgctgtataaagacctcttagaacgcaacatcaaagagacaaataatacaattaagaaatggaccagggatttaagcagacatttctccagagaaggtatacagatggtcagttagcacgtgaaaagatgcttaacatctctggtcatttgggaaatgcaaattaaaaccacaatgagacagcacttcactcccattaggatggttataactaaaaggaaaaatgggctggttgcagtggctcacacctgtaatcccagcactttgggaggcaggtggatcacctgaggtcgggagttcaagaccagcctggccaacatggttgaaatgccatctctactaaaaatacaaaaattagctgggcatgatggcgggggcctgtaatcccagctacccaggaggctgaagcaggagaatcgcttgaacccaggaggtggaggttgcagtgagccgagatcatgccactggactgcagcctggcgacaaagcgagatcccatctcaaaaaaaaaaaaaaaagaaaaacgatgacaggtgttgggaaggatgtggagaaatgagaatcctcaggcattgctggtggcaatgtaaaatggtgcagcctctttggaagttcatcatttgaggagaggcagttcctccaaaggttaaacataaagttaacttatggccagtcatcccaatcctaggtatctacccaacagaaatgaaaacaactgtccacaaaagacttccatgtgaatttcttagtctgaaagtggaaacaactctgtcagctgattcatagatgaaactttatttggcaataagaagaaatgtagttctgatccatactataacatggataaatctttaaaacattatgctaaaatccagtcacaaaaaaaaaaaacatgtatattgtatgatttcatttatagaaatgtccagaagaggcaaatttgtaggatggaaagtagattaatggttgcctaagactgaggaaaggggaatggagtgagtgccagtgggtatgggatttctgttggaagtgataaaaatatgctaaaattagattatggtgatggttgcacaactctaaatatactaaaagccattgaactctatacttcattatgttatgtaaatgagatttcagaaaacctgttttttaaaaaggcgagttaggtagcaaatgcacgtggtgctgaagctgttccttttagagccggctcttagcattctgtgtcctgagcattgtgctgtgagctaagagatagaacatgatttctgcttcccccacccctaaaaaaaggtttgggagatcagaagatgtaaaacagaaacccagaatgctcttctaagagttagctacagagtaaataaaagtttgaagagacttcctcaggcaggggaagacagaagtttcatagacaagatgataatagtaagctcactgctccattttttatttttaaaaacttgccacccaactcatagggggcagagactatgtcttaacacagggcctaccagcttcagggtaaaatcaatgaaatctttaaactgaggctaggcatggtggctcacgcctgtaatcccaacactttgggaggttgaggcgggtggattacctgagcccagaagttcaagaccagcctgaacaacatggcaaaaccctgtctctacaaaaaatacaaaaattagccaggcatggtggcgcacacctatagccctagctactcaggaggatgaggtaggaggatgaggtgggaggatggcttgagcctgggaggtggaggctgcactgagccatgatggcaccactgcactccagcctgggtgactgagtgagaccctgtctcaaagaaaaaaagtttacatgactatgagtatgttccataaatgaatcctttgaatgttatatatgctatgaatatttcacttagcctttggcttattgttttttgttgttgttgtgacattgtcatgtaaaagtttgtaatttttacatggtaaaacttatttttttaaaataagtttttaaagtttaaataaaaattatttaaaataagttttaaagctttagatcacaggtccccaacccccataccggtgacagtccgtggcctcttaggaaccgggccacacagcaggaggtgagccacaggcgagagaacattagtgccagagctccatcagcggcattagattctcttaggagcacaaaccctgttgtgaactgcgcacgtgagggatctaggttgcgtgctgcttatgagactctaatgcctgatgatctgaggtggaacagtttcatcccaaaaccttcccccaaccatctatggaaagattgtcttccatgagactggccccaggtgcaaaaaaggttgggaactactgttttagatgacatttcctaccctagttataaaacacattttcctataaattattcttctttccttttttacatttaggtgtttataaccctagtccagggcttctcaacctcagcacaggggcatcttggctgggtaactctctgtgggggggccatcctgtgtactgtatgatgcttgctgcatccctggcctctacccacaagatgccaatagcacctgcaccccagatgtgacagctaaaaatgtctccagacatcgccgaatgtccactagggagcaggatcaaccactgcacttgcgttagaccccaagtggttagagagccactgcacttgggttagacccctcttttttttttgagacggagtctcgctctgtcgcccaggctggagtgcagtggcacgatctcggctcaccataacccctgcctctcgggttcaagcgattctctcacctcagcctcccgagtagctgggactacaggcatgtaccaccacacccagcaccaccatacacagtttttgtatttttagcagagacggggtttcaccatattggtcaggctggtctcgaactcctgacctcaaatggtgatccgcccacctcgacctcccaaagtgctgggatcataggcataagccaccgcgcccagtcttagacccctcatttttgcagctgaggaaactgaggcccagagaagtggtgtggcctgagccaggtggcctagacagatggtggcagaaatctcaattcaaaatgcaggactgggaacctccactcctcgttctctttttttccctgtttttcctgtccccagccgtgagcacctctgctgtgctaggcactgggtagctgctggggccacagcagggaagaaaacaacatagacaaagtgatgaagacaagactccaggtcatgattagtgccatggagccaacacagaaagagtgctgggatcccaccagtgacagcatggtcacagggagcctctgcagaggtggctcactcactgacagctctgtgagtgtgggcatgcctttggtgtgtatgtgtgcgtttctaccaccacaacactgtcaggatggtctagaccctgctcgcagtcttgttctgccggggtgtgttgggcgcccccaaggctgccgtcatgcttgggggttttctgaaagacttgagacttagcatatggttgtattcaactaacattcactgcagcagcgtggtatggatgcacagctgggtgttaagggaaaaggcgcatgtagcagagtctggaggaatccacgtggggcttccttacgcgcactccctccctcaaggggttgtacgaagtgaatacttccccccgcaacgaaactgcaacacgtgtgatgtttttgcccagggaagcaaatgagagactcagtacccagagttttggctgagggctggctttataccctcggcccagcatgttccagaattccacactcccataagcaggtaggtgtcagcatagaccacgttgttcatacaaaagggtctaggcacggtgagccaagctactcttgtcagttaaaaaatggcgggaaccctcccaaaatccaagttcccagacaccatccaggcaccagccttgcaagtgatagcactcttaacctgctacgctgacactttgctgtgtgcgggaactttccaaaccaaggctttgaccagaaagccggtaataggaatttactcggagcctgggggccactgcttggggctgagagtgggggactgaagcgtggcctccccattgactggtgatggaatctgccctctcttgtttgccctctccagtgtggggctgccttccaggaggatgatgtcatcatgctcaatggcaccaaggaggatgtggacgtgctgaagacaaggatggaggagagaaggctgagagcgaagctggaaaaggtaatgggagtcttcaggttccgcccagcccccatctctgctccagagccgactgcaaatcactgaactgagctggcagctgcttaggggtttgcatgatcaaggcgatttttataacctagaagggcctggactgtagaagcagattccagctgaggcccaggcactgccttgctgtggtgagcacggcggctctgctcttccccgccgagctttctcatcagtgaagtggggtagtgacagcatgcgagggcacggagctgtcagcaggctccagagaccatggccataaagcactgacactgacacggcctcagcaagcccttggggaagggcagccaccaccgttgctgctgctgtcacttactgttgctgttgatttaaggcagtacatactcaggtctcatagcttgtaaaacaaaggaaaaatgaaaagtcaccatcatcccagcaaaatgtaaggctcccctgctgcccagattggaatgtgctcgggagggccctggcagtctgggctccagcaggcctgggtgggcctgggtgcctgtgcgtctcacccactcccagggcgtgtggatgcaactcctcagggtcacactttgaataacaaggagctaatgagtagccttcccaaaaatgggggccaaatccctcaccttcctgagccctcccacggggagagggagggtcttttatggagcgtggtgcttcatgcttcatcgttcagaagggagcgtggtatccagaaacagggaaagcattgctgagtaacgtggcggagtgagcaggctccagacaacgcatccaccaagagttcttccatgcgctggtgattccccatccagcagtaaatgttgttcatgtttacagatgatagctatggaatacaggcctttcgtgagtggcaaatttcttattctttaaaaaaaaaaaaagttgggttcaggataagctagggagaaaactttatgtgatcagaactaaggcaaaagaatgcttgaagtactagaaaattagctccagtaggctgaggacataaaattatgaaacaaatcgcctgccctcgcgtgggtgtgcattttaccagtgccagtccgaggcgagagtgatggagtacctgaagatttttcagaggtttggggtttttaaaaaatcataacaagacaggaccgtatcaccctggaataatgtgtaattcgtggttgtgaggctttaaaaagccgaggcttgagcacatggtagcagtattaccattatgcatggatccagaatgatcagaaagagccaaaggcatttgtattttctcccttcatcgttttacttaggtagaaaataatgtctgaaaatggctctgtagttcaaggaacggtgcccaaactctgaattcagatgcgagtagaaatactccgtggagcaatattataagatgttaatacaacattcctaacaactgtttaaagagtcacttggtaggcgggcgtggtggcgtgtgcctgtaatgccagctactggggagactgaggcaggggaatcacttgaacccggaaggcggaggttgcagtgagccgagatcgcacctctgcactccagcctgacagactccctctaaaaaaaaaaaaaaagccgcttggccattgaaatgctgtgttcaggttgaaaagtaaatacatgtgtatcttatataaagtgtgttaattctaagttggttttctaaattactatgatttcattattgtaagagagaaaaaaagagggaaactaagtttgaggtctttttaactaaggacagttgccaaaagccatctccctgttcttaattgctaccattgatcaagctcagttttaaaaaacacaaaagggcagccgggtgccgtggctcacacctttcatcccagcactttgggaggccgaggcaagcagatcacttgaggtcaggagttcgagaccagcctggccaacatggtgaaaccccatctctactaaaaatacaaaaattagctggatgtggtggcgtgcgccagtaatcccatgtactccagaggctgaggcggaagaattggttgaacttgggaggcggaggttgcagtgagccaagatcgtaccactgcacttcagcctgggcaacagagtgagattctgtctcagacagagagagagagagagagagagagacacacacacacacacacacacacacacacacacacacacacagtgagattctgtctcagacagagacacacacacacacacacacacacacacggaaaaaatgcatttcaaaggaaactactagaaatgttcatattccctttgaccattttgctttcgtgagttttctctgtcacaggtttcctgccaagttaattcaaagcccagtgggactaacatgctcctctctgcaaaatattctccagagcttctgggaatacctcatagctactgctaccaggataccaaaatatttcccaaatacacttgcagctggaagcaagatataacatttcctctctaactccttcttgcctgtgcttttcaaataacctcagctgtgaatggagggcttagaagtaaacagttgtctcttatttgtttgaaggaccgagtatcagttttcacagatgtgaatgcttgcattgcatgtgtgaaatgcacagaaggtctttatgttctgttataaatcacactgcatgtatatgttagaaattcaaggcctgagaggtctttctttaatgctcagtgctgggagatggctgaagtaatcaggctgcctatttttagtgccaccttttggatgcttaggaaattgacattttaaagtaaattaaatgaacatagtcctacttgtcatttctgcgattaaatcaattccaacgcagctgtgtgaccgtagaatggtttgttttattattgctgatcaaaataactattatgagtagcagaattctagtgcctggaaatctaacaagagtagttttgagtttagaagaattagctcaactgtctttaatataaacttcaaggccttacacttgaataacaaataccaaagcagtttgacagctttgaaaaaaagttagtggaatgtgcaagatttagttggtgtttatgctggctggacttcacatacccatatatactctgtgttactcatttaagtgcgcttttgtatacagttgtcaccatcaacattggcccttattactgaaatctgtcagcctcatttaaatttttgcaaatgtgatttgggagatgtaaatataaaagtgagcagctctgtgcagatacatttttgtgtgaggcagaagtgcatgactggtgtcacatgcagagggtgaaggctttaggagttacggaacatcaaaagccttcttcagagtgactgtctgtctcatgtgactagcatcggtcagtcagacagggcacccgggacaatgggcagccacactgacgctgaagtggagtgaatctgagcacagcctccaacattctctatctttttgtagaaaacaaagaaacccaaggcagcagagtctgtttcaaaaccagatgtcagtgaaggtaagatccttcaagagatccttattttagcaaaatgcgactctagggcagtctgctaatatgttcatgctttgttttgcattgtttttgctttgcctactttgtttcttttacagaagccccagggccatcaaaagttaagacagggaagcctgaagaagccagccttgattctagagagaagaaaaccaacttggctcccaaaagcacaggtgggtcctgttgtagctacagggagctgtttcgagaaggctggaaacccaggtggccgagtccaggtttcactggagtgggtggatgggaagcccaagcctgtcctatgtcatgtctctagagagtgcactgaactctctttaggggggtaactaagaaatattgaacacaccctcatcaggagccgtggcaggagtgatggggtctgggcacaaatgctggttgtttagattcctgtcgagtaagtgcttggtgccaagcaaaagaggttgcgctgagaactggctcagatgttgcacagagactgtcagatggactgtggctcagggcctgcggggaatgcccccagtttctttactcttggggctttcatgggctccacgtgtggctctcagagtcccctctctgctgcctcttgaccaaggatcagtttctcctaaaactcactctctgtaactcaaagaaaataccatttatttcacaaaaagaaaaatacagattcattgttaagagtgtgtgatcttgtgctctaagtagcatccagggtggctgacaggctcccatcccggctctacatgggacagccactcaggttcctgtgcccatttcctcccctggaacgcaggccctgcctcatcaggacaatctaagtcattcacggggctgggaccagtgtctgcgacagagcaagacagtaaatgatagatgtgttgtgctgtgtctgctttgctggagttggcaattaagatgacgtccgccagcactcacacagccagcaagagaacgtctgggacagagtgactgatgggcttcccttctgaggatgcgaagtttagaatcatctttatcccaaccctgacagttttggctcttcatttttctagcaatgaatgagagctcttctggaaaagctgggaagcctccgtgtggagccacaaagaggtccatcgctgacagtgaagaatcggaggcctacaagtccctctttaccactcacagctccgccaagcgctccaaggaggagtctgcccactgggtcacccacacgtcctactgcttctgaagcccgcactgccaccgctcctgccccagaaggttgtttagtttccacgtaggcaggtcgctttgtgcctctgagtgcgctgctgtgtgttctctctatagttctgtgtcataaagctgtcctggccagccttcaagctggtgtggccactcttgatgtgaggcgtgtcggttccaggggggacatgggaggggctgcacagtggcccgaggtcatgcttgcttccacctgcaggtgcatttggtcctttccatggccaggaagccctgtgggctgcactttttatgcttgcagtaacaagagactccagagtcctcaccggtgcagagttggcacatattaattaactaaaattctaatgatcttgctaccagcaataaatcaagtaggccaagtgaaactgggctttaaaaaggatggatttcaaatacactgtgcccactagaagcttcgaagggcctcgtccctctgctacagccctgggaggagccaggatccttgttggtctagctaaatactgttaggggagtgtgccccatctcatcatttcgaagatagcagagtcatagttgggcacccagtgattgggttcaaaaataaagctggtctgcctcttctctcctctgtgtttttatcttttctaccttctgctcatgcttgggtaagaacattgcagccgttgcattggtgattacaggagtcattccatgaagtcagaagaacccacccttctctcctccagcagatggtaaagggagaatcgtacccaaaaagaggtgcattttatctgcctataagttgtgttgacgtcaatagctagtgaaacttctcatgagactcctaatgaagaaccaagagccacaggcctctgcgtggctttctgcacacggtggtatgactgagatagtgactggttctctatacagaccccggggccctgggtttccttcagaagcagaaggagctgtgggaggtgaatggtgggaggtgaacaggcaggttctgtgggagacacagacacgtgggcagaactccagggagaggccagcaagggagaaccatgtgtggccctgctttttctcaaaccctgtgtggttcccggcttcacagttgatgggaaggtttggccccaaggatattttgacattgtgagtatagagcattttaataaaaattaagtgatgcgtttttgtcatggacttttccagaacaaacctggattagccatttaatttccccaattttctatacagccaaactcaaccattttctcattgtttttatttccccctttttttttttttttttttttaaattttgaaacagggtctcactctgtcatccaggctggagtgcagtggcatgatcatggctcaccatagccttgacctcctgggctcaggtgatccacccccctcagcctcccgagtagctgggattataggtgcgcactaccgcacccggctaattttgctattttttgtagagatgaggtttcgccatgttgcacaggctggtcttaaacttctgggaccaagcaatctgcccgcctcggccttccaaagtgctgggattacaggcgtgagccacgctgcctgggcccccttttcttttaatgaccattatttttaccaggttcggttttctgaatgttagcctgaatcagttttattttgcattgaatgtattgactgtgtccagttttttctggtaactgagtcacagcatcctcaacacaaaaattacagcatctcaaagtcctctgctttgggcctctctgaaataaacaggctgtgggcctccctccagctgccctcaggaccatccatgcaggagggatcagggtttccttggagatttctagccagcctttaatattttgctaaggcaccactcttcaaggctcctggccagcttgagggaagaaggtatccatgatctgtgctcctgctgggcatgaggcctcaatacaccaacggctggggagggctgatcattcgcattatttttagggctcactgagcagccaagcacttgacaggcttcttcccctgggactccccagccacccagtgcaatgggaagatggccatcccccactttataggtgaggtgcctgaggcccaaagcagcaaggcgaatgacagttctgcctggccacaccgcaccttctccccattcagtccgtaccaaatgaaggaatcagtggcggctggggcaggctcccacccaggcgccgagaccacgggttcaggtgctgtgcccaagaggaaagtggggcatctcctagctctccctcctcctccgtccacctccaggacccaagctgctttccaccaaggagggagctgggaggagaaaattgaaaagatgttgaaattctccaaaatagcatctattcaatttcccacagtatcggaggaaccagcccccaatatttcaatgtaggttcttttctcttttccctaagcatcggccggtctgagaaagagtacaaaagagagaaattttacagctgggtctctgggggtgacatcacgtcagcaggttctgtgttgctcccgagccgcaaaaccagcaagcttttattagcaattttcaaaggggagggagtgtacgaataggttgtgggtcacagagatcacatgcttcaaaggcaataaaatatcacaaggcaaatgggggcagagcgagatcaaagtccagggcaaaattagaattgctgatgaggtttcatgtcccactgtgcacgcattgtcattgataaacatcttaacaggaaacagggttcaagaacagacaaccgatctgactagaatttcaccaggctggaatttcccaatcctagcaagcctgggagagctgcaggagaccagggcgtatttcatcccttatctacaactgcataagacagacactcccagagcggccattttagagacctccccctgagaatgcattcttttcccagggctgttccttgctgagaaaaagaattcagcgatatttctcctattcgcttttgcaagaagagaaatatgactctgttctgcccggccccgcaggcagtcagaccttaaggttatctcccttgttccctgaaaattgctgttatcctgttcttctaggatgcccagatttcatattgttcaaacacgttttacaaacaatttgtacagataacgcaatcatcacagggtcctgaggcgacatacatcctcagcttacgaagacgacggaattaagagattcaagtaaagacgggcataggaaattataagagtattgattggggaaggaataaatgtccatgaaatcttcacaatttatgttcttctgccgtggcttcatccagtccctccatttggggtccctgacttcctgcaacaccacagcacttcatttccaacaaatgaaatgaaagctgtgccaaaatgaatgaaagaagtgccgccccaccccacagcccagacaagtttggctcaaagatctggtctgcttacccactggtcctgctctattggagagtgctgtagacttttgaatacatataggaaaaagtgattcccattattaaagactgaacatttccaaataacaaaatcacatgtggcaaaacttgtgagcatttctgttgtttggggccattcctgtaaaccacgtctgtttgccccttactgctccatcgcaccacagccaccaaacttcccagccgacttaagacacgggctgactgagcactgtggctcctgtctgcagtcccagcactttgggaggctgaggcaggaggactgcttgagcccaggagttttgagactagcctgggcaacacagggagaccctgtctctaccaaaaatgaaataaaaattatccagaccctgtctctaccaaaaacaaaacaaaaaaaaaaacaaaaattatcgaggctgcagtgagccaagatcattccactgcactccagtctggatgacacagcaagaccctatctcaaagaaaagacacaggctgtgtatggacatgggggcctctgaaaataattagccatccctcaaagctgctggaatggggaacactggggacagggagccgcatgatgccaaggacaggcctccaaactgaggtcacagggtggcccaaggccctggaaatcagggcagctgcctctacagtgggtgtaattccaggcagtagctgccaagctgagtgggcccctgcaagaagagaagtgcccgtcttctggtcaacctggagatttgcatctctccatcgtgcccagtctctggcaggaagccccactccccagccgacactgcaccatgctcatggaggaagaagctgtgcagcacagcccaacagcgttttcccctttcggttttctagagtagtcttgcagaactattttttggtttttttttttttgagagagtctcactctgttgcccaggctggagtgcagtggcaccacctcagctcactgcaaccaccgcctcctggattcaagcgattctcctgcctcagctccagagtagctgagattacaggtgtgcaccaaaacacctggctaatttgtttttattttcagtggagacaaggtttcaccatgttggtcaggctggcctcaaactctttgacctcaggtgatctgcatgccttggcctcccaaagtgctgggattacaggcatgagccactgcccctggccatagtcttgcagaactactttgtcactccacagagatcagtagtttaaggcacagcgaaggtgcccagctgaactttgattatttcctgtgcagcataaagttctgctcctcgggagtaaatctgcaaatcagagccttcctcaggaagatagctctacagatgacccaggggaacaagtacaagccgtgcgttccagcacccaggatttcttgtttcatgtcattttaaagaacacatggtttcgagtatactatggagtcctaggtttattcccagccttggcctcagttgtcaagctagctgttcctttttacttgggggattcagccccttcccattttacccaccaactcttaatcatctcccctgctctactcaaccatctttttctggacactcttcctgcttcctgcataacctagtttagagcagtccccttatgctagtctctaaagcttcctgttcttatcacaattttaatcaaagtatactctctctctttttttttttcttcctgagatggagtctcactctgttgcccaggctagagtgcagtggtgcgatctcagctcactgcaacctctgcctcccaggtccaagtgattctcctgcctcagcttcccaactagctgggcctacaggcctatgccaccatgccgggctaatttttgtttagtagacatggggtttcaccatgttggccaggctattctccagctcctgacctcaggtgacccacctgccttggcctcccaaagtgctgggactacaggtgtgagccaccacacccagcccaaagtatactcttaacccagggtgggcacacactgctacgatcaatgatggtgtgaggtaatagtgagtggtggggactgtggagggaatatggccaccgaaaggacggtttcacttggctgcagcagagagactggttccatgagggtgtgcactcattgtttctggacctcccatattttcaaaggaagccagaatgtggagttttaaagtgaaatgccccccaatatttaagtactgacaatttttaaaaacaatgtaggccaaacaaaacacataggtgggccgggcgcagtggctcatgcccgtaatcccaacactttaggaggccgaggcaggtggatcacctaaggtcggaagttagagaccagcctgaccaacatggagataccctgtctctactaaaaatacaaaattagccaagcgtgatggtggatgcctgtaatcgcagctactcaggaggctgaggcaggagaatggcttgaactgggaggcggaggttgcggtgagctaagatcattgcactccagtctgggcaacaagagcaaaattccgtccccaaaaaaaaacaaaaacaaattttttgtttgtttagtttgagccacataggtggctccaaatttgtaggtagcctgtggtttaatatctttctctcccgtttaactcagctccacggggcacatggcatctccctctgctcatcacaatgtctggatcaaacaaatgaaaaacaaaaacatgatggcctctcccagcaaagctccagggttggaaagagtcccctggcagggaattggcaccccgtcgtgcccatcctctctctctgactgcctgctggaaatgcccccatctccctttgagtcctcctcccgggcaacccctgtgacctgtaacctctgtcctgaaatcatcacaatggccagagtggcctcagctcagggcctctgtgacatcaccaagggcctggcaccaggtgcccagtctcccagttgcgagggcaagcaaacccgtcatgagcaactcccttccccatctctgctcaccatgtggacgctgaaatcgtccctggtcctgcttctgtgcctcacctgcagctatgcctttatgttctcttctctgagacagaaaactagcgaaccccaggggaaggtgcaatacggagagcactttcggattcggcagaatctaccagagcacacccaaggctggcttgggagcaaatggctctggcttctttttgttgttgtgccgtttgtgatactgcagtgtcaaagagacagtgagaagaataaggtaaggatggctccattttttttacaccatattgattcaatctcaggagtctcagggaaacggatgttctagtgagtctagacggcaccgttgggtataatgaaccgacctcatggtcctgggcaaagctggcaaattcacttcctgatgtatccttagtgaagacaattgtccccagatccacagatactgggacaaagagtggaaagtgacctctgcttactggctcacagattttctggttagatggattttttcaaatgtaggatagattcaagaacttatggtgtgtttcagaaagtcaaaattattcacagggccagattcactagcccctgttttttaaattcttgctagtgtttgacttactacaaaatcctgagctaaatggaaatgatatcattatcccaacaaaatatgagacttgtgctgaagagataaagatgtaaggtagtttgagctggtcctcaaagtgaccacaaacaactctttcaggtagaaaaggaaggggagagaaagtgcgttctcccctagaaagacccagcacttcataatcctgtgcccaaactgatgagagcagggatcggcaaacccttcccgtaaagggccagggagggtgcgaatatcttcagctttgtgggcagtatggtcttcttgcaactactcaagtctgctgttgtaacacgaactgtgtcaaaaccaacaaagttcacaatattactgaccttgagtatctttcctgacaggagcagagtcctcctggccttcgaggcggccaacttcactctccattaaagaaaaaaagaaatgcttcccccaacaaagactgtgcattcaataccttaatggaactcgaggtggagcttatgaaatttgtgtccaaagtgcggaatcttaaacgtgccatggcaacaggtagtggcagtaacctcaggcttcgaaagtcagagatgcctgcagatccataccatgtcacgatctgtgaaatatggggagaagaaagctctagctgaatggatttgtgtgtcaggagagaaaaaagttgagtgttgacaaactgtatgcaaactaataaaactattctgaagaaaagaacttccatgtttgagagcttgcttcttttctttttttcactagaagaaaaagtgaatgggagaccagtagccatagcagtgatggttttgtttttgcctctctcacgtcatctagagctgtgggtggtgagaagaacaccgaaagctacataatagtacgtgatgagctcgtgcttctgttcaatggccgcgggtggacgatggagctagggaaatctgggataagatgctgacgtcacttccatacaaactcttgctctctatagcatctatttgtgcaagatgcagaactgctttttatctttgatttattacaaaagacagcattaatgatagttttaaaatggtaaaatgattcaattaggaggggtgtattctagagttatctgattctctcaccacaagagtcctttcactcattccctgtcaaaggttccgtgtatattgacttttccttctaccacactagcagttacatttgtcaataattggatttaaaaaaaaaaaaagggggatgaggcaggagaatcgctcaaacccgggaggcagaggttgcattgagatcgcaccgctgcactccagcctgggtgacagagcgagactccatctcaaaagaaaaaaacaaaaaggagaggcccggcatggtggctcacacctgtaatcttagcccattgggaggccgaggcaggaggactgattgagcctaggagtttgaaaccaccctgggctacatagtgagaccccatctctattattttaaattaacaagaaaacggagaaaaattcattcatcctatgccattggagttttggatacaagtgtgctaaccaggggctcccagattaattgacatgttctttatcctacttattcaaaatgtggatattttacatgttactgtggctgatggcatctctgtacatacttaggtgcttgcctaatggtgatttctattttcctctctcctacagtgtttattgattggaattctgctgtaagaagagctgttccttcgccgatgattgatggatgggtttctgtatggacttacaggtgtgtttttttttttggattattttctggctccacctttcccacctttggcgttaggagctgcttcgggttggcacttgtgttctgtgagcaagccccttcctcttttgagcaattccttactttctggcaacccaagatgctccatgctcatctggttcattgcctgccttcatcctggaatcagccacttccccaaggggccaggttccctttcttggagaatggtgacctgccctcctgcagccaggatcatgacttatcttaaaatccttcatttaattcatctgcaaaatgtctcttgccacatgaactgcaggcccacaggtcccaggaatgagtgcataggcatctctggggccggtacccagttgaccagtgctgtcaccctcacaagcatcaaagtcacccagggcgcaaggaagaccaagaccatgaggcaggaggccatggcttctgcggctgcagcagaagcaggagagggaggcagggcagacagcagcccagatgcctggggcctcaggggaaggaggccctgcctcgaaggcataggcgtccctcaagggtcccaaccccgggccctgaagggtgggcagcatcttcccgggaagaatatggtggctgggcatggtggcttatgtctgtaatcccagcactttgggaggccaaggtggacagatcacctgaggtcaggagttcaagaccagcctggccaacatggtgaaaacccgtctctatcaaaaatacaaaaattagctgggcatggtggaagacacctgtaatcccagctactcaggaggctgaggcaggagaatcacttgaacccaggaggtggaggtggcagtgagctgagattgcaccactgcactccagcctgggcaacagagctagactctgtctcaaaaaaataaataaataaaaagaatggttacccaggtgcggtgctgtgcacctgtggtcccagctacttgggaggctaaggtaggagcatcttttgggtctgggaggtcgaggctgcagtgagccatgattgcaccgtagtgctacagcctgggtggtggcgtgagaccctgtcttcaaaataaaaataaaaataatgtttgggggctgggcaaaatgattctcacttgtaatcttagcactatgggaaattggggaaggcagatcacttgagcccagaggttcaagaccaccctgcacaacatggcaaaaccctctctacaaaaaaaaaaaaaaaaaaaaaaaattagccgggcatggttgcatgcacctgtagtcccagctactcaggaggttgaggtgggaggatcccctgagcccaggaggtggaggttgcagtgagctatgattgcaccactgcattccagcctgggtgacagagccagaccttgtgtccaaaaaaaaaagttggggtgctttagtccttaggagtagtcctagggaaacagaatctctctctctgactttctgtcctcctttccctgcccaaggtaggactctaatcagattgggagcccaaagacctcattcgagagggtcatgccgcataccctagagcaaggaaagctgcacagagagaccaagaggaatctggacaggccctgatgggttccccaatcagtctgttaatatgagagcatattaatttttggcccaatcacatttcttcatgattgtgtatcatccctgtttaatgaagctgccattaaaacccaaaagaagacccggcatggtggctcacacctgtaatcccagcactctgggaggccgaggtgggtgaatcacctgaggtcaggagtttgagaccaacctggccaacatggtgaaactctgtctctactaaaaatacaaaattagccgggtgcagtggtgcctgcctgtaatcccagctacttgggaggctgaggcaggagaatcgcttgaacccaggaggcggagtttgcagtgagccaatattgtgccattgcactacagcctaagtgacagagtgagaccgtatttcaaaaaaaaagaaaacaaattattcttaggctgggtgtggtggctcacacctgtaatcccagcactttgggaggccaaggtaggcggatcacctgaggtcaggagttcaagaccaccctggccaacaaggtgaaaccctgtctctactaaaaatacaaaaattagcgaagcatggtggtgggtgcctgtaatcccagctacttgggaggctgaggcaggagaattgcttgaaccctggaggcggaggctgcagtgagctgagattgtgccattgcactccagtgggtgacagagtgagactccatctcaaaaataataataattaaaaaataaaaatacaggcctggcacaatggctcagtcctataatcccagcattttgggaggccgagacaggtgaatcatctgaggtcaggaatttgagaccagcctggccaacatggtgaaacctcatctctactaaaagtacaaaaattagttgggtgtgttggcgtgtgcctgtaatcccagctactcaggaggctgaggcaggagaatctcttgaacccaggaggtggaggttgcagtgagccgagatcacgccattgcactccagcctgggcaacagagactccatctcaaaaaaagaataaataaataaacaaataataaatacaaatacgaaaattaggcaggcgtgatggcatgcacctgtagtcccagctactcaggaggctgaggagtgagaatcacttgaacctgggaggcagagcttgcagtgagctgacatagtgcccctgcactccagcctgggcgacacagcaagactctgtctcaaaacaacaacgacaacaaaaatccactcaaccacccacccacccacacacccatccatccaaccatccacccatccatccatccattcatccatccacccacccactaacccatccatccatctacccacccacccatccaccctcccacccactcatccatccattcaacaacatactgagtatctactgtatgccattttggcaaggagcaggaatggaggacaaagtcataggcaggaaaaggattctggaaaagtggtccaggcagatgtcaggacaaagggaagagtttgctcaagtttgtcatgtggaggagcagagaggacgctggcagggcaggtgggaatggaggaagttgggtttgctgggttgataagggccagatcagacatcattttacagaaggattcattgaacaactatggtatgtaccacatgtgttctgttctttttcccctagactgctcaggagaatttattcatttttttttagagacagagtcttgctctgttgcccaggttatagtgcaatggcatcatctgagctcattgcagccgcaactcctgggctcaagcgattctcctgcctcagcctcccaagtagctaagattacaggcatgcaccaccacactcagctaatttttttttttttttttgtatttttagtggcgacagtgtttcaccatgttggtcaggctggtctcgaactcctgacctcagatgatctgctcacattggcttcccaaagtgctgggattacaggcatgagccactgcccctggccatagcttgtagaacttctttgtcactccacagagctcagtacaatttaaggcacagcgagggtgcccagctgactcttgattatttcctatgcagcataaagttctgctcctcgggagtaaatctgcgaatcagagccttcctcaggaagatagctctacagatgacccaggggaacaagtacaagccgtgcattccagcacccaggatttcttgtttcatgtcattttaaagaactcatggtttcaggtatactgtggagtcctaggttcattcccagccttggcctcagttgtcaagctagctgttccttctcacttgggggattcagccccttcccattttacccaccaactcctaatcatctcccctgctctactcaaccatctttttctggacactcttcctgcataacctagtatagagcagtccccttgtgctcgtctctaaagcttcctgttcttatcacaattgttttttcttctttctttgttttttttttttttttgagatggagtttcgctcttgttgcccaggctggagtgcaatggcacaatctcagctcaccgcaacctctgcctcccaggttcaagcaattctcctgcctcagcctcccgagtagctgggattacaggcatgcaccaccatgcccagctaatttttttgtatttttagtagagatggggtttctccatgttggcttggctggtctcaaactctcgaccttaggtgatccacccacctcaccctcccaaggtgctgggattacaggcatgagccaccgtgcccggcctcttaccacaattttaatcgaactatactcttttttcttttctgaaacacagtctcactctgtcacccaggctggagtagagtgtcttgatctcagctcactgcaacctctgcctccaaggttcaaatgattctcctgcctcagcctcccaagtagctgagattgcaggcgtgcattgccacacctggctaatttttgtatttttagtagagatggggtctcgctatgttagccagattggtctggaactcctcctgacctcaggtgatctgcccaccctggcctcccaaagtgctgggattacaggtgtgagcccctgcccctgtgcctggcccaatgtatactctttttttcttttcttttcttttcttttcttttttttttttttttttgagactgagccctgctctgttgcccagactggagtgcagtggcgccatctaagctcactgtaacctctacttcctgggttcaagtgattctcccgtctcagcctcccaagtagctgggattacaggcacatgccaccatgcctggctaatttgtgtatttttagtagagatagggtttcaccatgttggccaggctggtctcaaacttctgaccttgggtgatctgcctaccttggcctcccaaagtgctgggattacaagtgtgagccaccaggcctggctccaaagtatactcttaacccaaggcaggcacacactgctgctgtcaatgatggtatgtggtaatagggagtggtggggactgtggagggaatatggccacaggatggatgatttcacttggctctagcagaagactggttctatgacagtgtgggcccagtgcttccagaactcttcatattttcttttctttctttttctttttcttttttttttttttttttttttgagacagagtcttgctctgttgccaggctggagtgcagtggcgtgatctcggctcatcacaacctctgcctcctgggttcaagtgattctcctgtctcagcctcccaagtagctgagactacaggcgtgtgccaccacatccagctaatttttgtatttttagtaaagacggggtttcaccacgttggacaggatggtctcgatctcttgacctcgtaatctgcccgcctcagcctcccaaagtgctgggattacaggcgtgagctgccgcgcccggccacgctctcatattttcaaaggaagccggaaacctggacttttaaagtgaaatacccaccccccacaacatttaagtactgactaataatttttagaaacaacataggccaaacaaaacacataggtggctccgagtttgtaggtagcctgtggtttaatatctttctctcccatttaactcagctccacggggcacatggcatctccctctgctcatcatagtgtttggatcaaacaaatgaaaaacagaaacatgacggcctctaccagcaaaagctcgagggttggaaagagtcccctggcagggaattggcaccccgtcgtgcctatcctctctctctgactgcctgctggaaatgcccccatctccctttgagtcctcctcccgggcgactcctgtgacctgtaacctctgtcctgaaatcatcacaatggccagggtggcctcagctcagggcctctgtgacatcaccaagggcctggcaccaggtgcccagtcttccagttgcgagggcaagcaaacccgtcatgagcaactcccttccccatctctgctcaccatgtggacgctgaaatcgtccctggtcctgcttctgtgcctcacctgcagctatgcctttatgttctcttctctgagacagaaaactagcgaaccccaggggaaggtgccgtgtggagagcactttcggattcggcagaacctaccagagcacacccaaggctggcttgggagcaaatggctctggcttttgtttgctgttgtgccgtttgtgatactgcagtgtcaaagagacagtgagaagaataaggtaaggatggctccattttttttacaccatattgattcaatctcaggagtctcagggaaacggatgttctagtgagtctaggcggcaccgttgggtataatgaaccgacctcatggtcctgggcaaagctggcaaattcacttcctgatgtatccttagtgaagacaatagtccccacatccacagatattgggacaaacagtggaagatgacctctagtttcttggctcaaagttcttctggttagatggattttttcaaatgtaggatagattcaagaactcagccgggcgcagtggttcatgctgtaatcccatcactttgggaggccagggcaggtggattgcctgaggtcgggagtttgagaacagcctggccaacacggtgaaaccccatctctactaaaaatacaaaaattagctgggcatggcggcgtgtgtctgtaatcccagctactcgggaggctgaggcagaagaatggcttgaaccctggaggcagaggttgtggtgagctgagatcacactactgcactcctgcatgggcgactgagactctgtctcaaaataaagaacttatggtgtgttttagaaggtcaaaattatattattcacagggccaaattcactgttcccttgctttttacatttttcctagtgcttgacttactgaaaattcctgagctaaatggaaatgatatcatcccaacaaaatatgaaacttctgtaaggagataaaggtgtaggccgggcacagtggctcatgcctgtaatcccagaactttgggaggccgagacgggcagatcacttgaggtcaggagattgagaccagcctggccaacatggtgaaacctcgtctttactaaaaatacagaaattaggccaggcgcggtggctcacccctgtaatcctagcactttgggaggctgaggcgggtgaatcacgaggtcaggagttcgagaccagctgggcaacatggtgaaaccctgtctctactaaaaatacaaaacctagctgggcgtagtggcgggcgcctgtaatcccagctactcgggaggctgaggcaggagaatcacttgaaccctggaggcagaggtggtagtgagccgagatggagccactgcactccagcccaggtgacagagtgagactctgtctcaaaaaaaaaaaaaaaaaaaaaaaaagctgggcccagtggctcatgcctgtaatcccagcactttgggaggccgaggcggacggatcatctgaggtcaggaagttgagaccagcctgaccaacatggagaaagcccgtctctactaaaaatacaaaattaggcgtagtggcgcatgcctgtaatcccagctactcgggaggctgaggcaggagaatcgcttgaacccgggaggtggaggttgcagtgagccgaaactgcgccattgccctccagcctgggcaacaagagcaaaactctgtctcaaaaaaaaaaaaaaatacagaaattagccaggtgtggtggcacacccctgtaatcccagctactcgggagactgaggcaggagaatcacttgaacctgggaggcagaggttgcagtgagctgagatcgtgccactgcacgccagcctgggcgacaaagtgagactctgtctcaaaaaaaaaaaaaattagctggtatggtggtgggcacctgtggtcccagctacttgggaggctgaggcataagagttgcttgaaccccggccgggggtggtggctcatgcctgtaatcccagcaatttgggaagccgaggcgggtggatcacctgaggtcaggagttcgagaccagcctggccaacatgataaaaccctgtctctacaaaaatacaaaaattagccgggcatgatggcgggtgcctgtaatcccagctactcgggaggctgaggcaggagaatagctggaacctgggaggcagaggttgcagtgaaccgagatcatgccactgcactccagcctgggtgacagggcaagattccgtctcacaaaaaaaaagaattgcttgaacccaggaagtggaggttgcggtgagccaagatcacaccagcctgggtgacagagtgaaactgtgtctcaaaaaaacaaacaaaaaaaagagatgaaggtgtaaagtagtaacagctgggcctcaaagtgaccataaacaattctttcaagtagaaggagaaagggaaagaaagcgtattctcccctagaaagacccagcatttcatgatcctgtgcccaaactgattagaggaaggattggcaaactttttctgtaaagggccagagagtgaatatttacagctttgtgggcagtacggtcttccttgcaactactcaaatctgctgttgtaacatgaagcagccttaaacaatatagaaatgagtgagcatgactgtgtgccaataaaactttatttacaaaaacaggtggagggccaaatttggccatagtctgccagtgcctgcactcgagcactgctagaaccatcttttcttaaatgagcccaactgtcttggaactgtgtcaaaaccagcaaagtccatgatattattgaccttgaatatctttcttgacaggagcagagtcctcctggccttcgaggcttcccatttcgcactccactaaagaaaaatcaaaatgcttctctttacaaagactgtgtattcaataccttaaacgaacttgaagtggagcttttgaaatttgtgtccgaagtgcagaatcttaaaggtgccatggcaacaggcagtggcagtaacctcaagcttcgaaggtcagagatgcctgcagatccataccatgtcacaatctgtaaaatatggggagaagaaagctctagctgaatggatttgtgtgtcaggagagaaaaaagttgagtgttgacaaactgtatgcaaactaataaaactattctgaagaaaagaacttccatgtttgagagcttgcttcttttcttttttttcactagaagaaaaagtgaatgggagaccagtagccatagcagtgatggttttgtttttgcctctctcatgtcatctagagctgtggatggtgaggagagcaccgaaagctacataatagtacgtgatgagctcgtgcttccgtgcaatggccgcgggtggacgatggagctagggaaatctgggataagatgctgacgtcacttccatacaaactctcgctctctgtagtatctacttgtgcaagatacagaactgctttttatctttgatttattacaaaagacggcgttaatgatagttttaaaatggtaaaatgattcaattaggaggggtgtattctagagttatctgattctctcaccacaagagtcctttcactcattccatgtcaaaggttccatgcattgacttttccttctaccaaactggcagttacatttgtcagtagttggattaagaaaaagggagaggccaggcatggtggctcacatccgtaatcttagcactttgggaggccaaggcgggaggattgcttgagtccaggagtttgaagccaccctgggcaacatagtgagattccttctctattatttttaaattagaaaaaaaaaaaagggaaaaacaattcatcctttctatatcattggggttttggatacagatgtgctaaccaggggctccccaatcagttgatatgtactttatcatacttatttaaaatgtggatattttacatgttagtgtggctgactctgcacacacttagggctgtaagtctcctactgacccctgagccgaccttccctcatttaaaaggccaacctgtggccgggtgtggtggctgaagcctgtaatcccagcattttgggaggctgagggggcagatcatgagatcaagagatcgagaccatcctggccaatgtggtgaaacctcgtctttactaaaaatacaaaaattagctgggcgtggtggcaggcgcctgtagtctcagctgtttgggagactgaggcaggagaattgcttgaacccaggaggcggaggttgcggtaagccgagatcatgccactgcactccagcctggcgacagagcaagactccatctcaaaaataaataaataaataaataaaaggccacacacacttgtgcgtggctggagagaacagttagctgtgggacaccatggaaattcctttatttcacttcagtccaaacttctggtgcctgacagagaagtcctgaatctctgccaccttcctttatttgtccgctcccattatttgcacaaggctttcaggatcctccctgaacatgtgattttctccatgtgtaggaggtggacctcttgtaaaatgtccttgaacattttgctttttgtcttaactctcagctttcaatatgggggaaatggaaggagccaagattactccttttgccttccagattatttatgagtgttttcaagcaaaccagagtatgtgagttattgtcacagcccactctgaagaaatccagataagaaaaaaattggttttaaccagtaatctcaagatggggcaggttttagattgtcttcatttaaccagtagctattagatctgcggtcagcaagctacagctcacaggccaatttggccgcctgcctatatttgtacagccttgtgaactaataatgatttttatattttttcgtggttaaaaatatcaggcagggtgtggtggtgtgcacctgtagtaccagctactctggaggatgaggcaggaggattgcttgagcccaggagtctgagttcagcctgagcaacatagtgagaacctgttgctatatatatatatatatggcaacatatatatatatggcaacatatatatatataatatatatatttgaagacatgaaactcacataaaatccaaattttagcacccatgaagttttattggaacacagccacattctttaatttacatattatctatggctgcttttgtgccacagaatttccacgttgtctatgggtctagattttgtgcttacagtggcacgcttgaattattgcaacagaaaacaatatagcccagaaatatttactaactggccctttacaggacaagcttgccaacccctaatttatgctaatctcatatgttaacaagcagaagctgggcgcggtggctcacatccggaatcccagcactttggtaggctgaggtgggtggatcacttgaggtcaggagtttgagaccagcccagccaacatggggaaactctgtcgctactaaaaatacacaattagttaggcatggtggtgggtgcctgtaatcccagctacttgggaggttgaggcaggagaatcacttgaacccgggaggtggaggttgcagtgagccgagatcgcaacattgcactccagcctgggcaagagagctgggcaagtgtctaatttttgtactttcagtagagatgggttttcgccatgttgcccagcctggtctctgactcctgacctcaggtgatccgcccgcctcggcctcctaaagtgctgggattacaggcgtgagccaccacacccggccccacctcagcctttctagttgctgggaccacaggcatgcaccaccttgccaggctattatttttaagatattttttgtagagtctgttgcccaggctggtcttgaactcccaagctcaagtgatcctcctgcttagtctcccaaagtgctgggattacaggtatgagctaccacacccagcctataaaccacatttttgtgtatagctccatccagggcactagcaactaaagatggggatcctccgaaaggggaaattgtcaaaactccttagagcaagtgcaccaaggatgtaaattagaacaaaatctgctgtacatttggatttaacaattcctcaaaaatggtatcctccatgtctttggcctagcttaatacacactgtgcagaccacagttttgcctagaaaatagtgttttctcaatccagtcaatttcatgcagtattttcatgctaaaatgcattagatgtatttttggagccatatcttaaagttactcaactctactgtcatagcataaactcaaattctgttaccacaccctgtggtttaaaaagagaaattgaggcctggcgtggtgtctcatgcctgtaatcccagcactttgggagaccaaggcaggagtatcccttgagtctaggagttcaagacactcctgggcaacatggtgataccctaactctataaaaaatacgcagaatagtctggataatggagcctttggagaaaaagtcttaaaaaagaaaagaaaagaaaaaacaaaacaaaaacaagcaaacaaaaaaaaactggtcgagcatgggggtgcatgcctgcagtctcagctactagggaggctgaggtgggaggatcacttgagcccgggaagtcgaggctgcagtgagccgtgataccaccactgcagtccaggctgggtgacagagtgagaccctgtctcaaaaaaaaaataagaccaggtgtggtggctcatgcctgtaatcccaacactttgggaagcggaggtgggtggatcacctgaggtcaggagttcaagaccagcctggccaacatgatgaaaccccgtctctactaaaaatccaaaaattagctgagcatggtggtgtgcatctgtagtcccagctactcgggaggctaagccaggagaatcgcttgaccagggaggtggaggttgcagtgagccgagacgatgtcactgtcctccaacctgagcaacagagtgagactccatctcaaaaaaaaataaaaatttaaaaatttaaaaaagaaaatgaaaaataaaaagagaagctgatgcataaatgataactgctgatcactgtagttgcctaaatcctaataaagtgtttatcagagcaggctgacagctcagactgtctgcagaatgcattcccttgcagctgtaggactcgtggcatttcgcatcttcagagccaataaggagagtaagattctagagtgagtcactcatacaacaggggcctcacaatgtgatgtcatcatgggagccatggacatcagctctgccatgctctactgggtggaaacaggtcactcacggtttgaataccaggaatgggacccagctgcaaagacgctgctccagcatgaggtgatggaggcgtcgtgctgctgctaacaaaaaattgagcattagacaggaggggacatggtcactggacagggccttgttcatgaacctcgatgcgggtggtgggctgaattctaagatggtcccgagaggcactcaccttttggtttttggggggttttttgtttgcttgtttttgtttttgagatggagttttgtcttgtcacccaggctagggtgcaatggcacaatcttggctcaccgcaacctcctcctcccgggttcaagcgattctcctgcctcagaccccggaatagctgggattacaggcatgcgccaccacacccggctaattttgtatttttagtagagacggggtttctccatgttggtcaggctggtctgaaactcccgacctcagatgatccgcctgcctcggcctcccaaagtgctgggattacaggcgtgagccacttgcccccggctggcactcaccttttgtaatctttcccttgagtgtggtgggagctgtgaagacgatgacattgtcttacgtaagaccccatagtagccacgagacttccctggcagcctgaagatggaggctgcggtattgtgagaccacgggggttccatggtagggacatgagggtggccgctaggacccgaaagaaagcctagacaacagctgggaagaaagcgtggcctccagtgctatagctgtagaaatgcattccaccaacaaccagtggcttggaagagggagcctaagcctcagatgatagagcagccatgaccgacacctgatttctgcctggtgggaccctaagcagagaccccgccagccttacgtgtactcctgacccacaaaaactgtgtgataagtgggcgttgttgtaagccactacacttatggccaagtttttacacagcaattgaatacatcatgcatacacacacaaacacacaaaatgtttccatctgccacttctgataccacagctgacacgtccaccttgccctttgacctagtcactgggtctctgaaccagggaaatgagaccaaagaaacagcagccatggatcaagaatgagaacacccagtcccttgaaagcagaggctatgaactattggctcagacaccaaacctcccctgcccataccatgtttgtttggcccacagtaatttttcttaactttttcttttgaaataatagtaggttcacaggaagttgcaaaggtggcactgagaggtcccgtgtgctcttcacccagtttcctcctgtggttgcgtcttaggtaagtcaatcccaaaaccagggaggtgacgcggagcaacgtgtgtttgcagagctctgggctgttttatcccccgcatggattctggtaatcaccaccaccaacaagatacagaagggctgggcgtggtggtgcacgcctcccagcattttgggaggcctaggcgagaagatcacttgagcccaggagtttgagaccagcctgggtaacatagtgagaccgtgtctctgcaaaaaatacaaaaattatctgggcatggtggcttgcacctgtagtcctaggtattcaggaagctgtgcaggaggattgcttgagcctgggaggtcgaggctgcagtgagctgagattgcaccgctgcactccagcctgggcaacagagtgagaccctgtctcaaaaatttttttaaaaaatgatctttatgttagggctatgtaaaaacaaagaaggaaaagaagatacagaagtgtcctgtgcaccgagctgccttcccccaccatccctaacccccggcaaccactaatttccacctctgtaattttgttgtgagagtgttctataagtggaatcatacagtctgcgaccttttgagaggggctcttttcacttagcctaactcctttgaggtccctggttgttacccacaccatgagttcaagtctttctgtcactgagtaccacgtgtcccactttgttgaaccatccccttatggagggacacgtaggttgtttcaaaaagctttggtattataaacagctgctatggagaatcacgcacaggctctcgtgtggacacgagtcttcatgactctgggataaatgcccagaagtacaatttctggatcatggagtaagtgcatttcagcccacagtaatttttttgaaagtttgaattagaggctgatagagtctggctctgtgtccccacccaaatctcatcttgaattgtaatccaaattgtaatccccacgtgttgggggacagaccttgtgggaggtgattgaatcatgggggtacttccccagggctgttctcatgatattgactgcgttctcatgagacctgatggtttcgtgagggcttttctcccctttgctccgcacttctgtcattctcctccttgctgccaccatgtgaagaaggatgcatttgcttccccttctgccatgattgtaagtttcctgaggcctccccagccctgtggaacagtgagtcagttaaacttctttcctttataaattacccagttttgggtatttctttatagcagcgtgagaacggactaatacagtggccaacattttacaatgaaatttcacattatattctaatgtattctaatgggagagatagatagcaaaccataagtaccgataatatgcaaataattacaatgggggatgtatcacaatggatttaaaccctttgtattttcccactgtgctcacagtggtgttcaatcccactccgctggcctgcaggtgcccacaggtcctggtcccctcctagctctgtgaatagtcccctcccagctgcatgtgccaagctcatttctgcctcagggactttgcacaggcttccttccctggcatgtttcctccagataccacattgctggctagtaggcttgtgactttggtctttgctcagcggtcacccctcagggtggctctccctggcaacccagctaacggggcccctcccatctctcctatcacatcctccgactttctttttttttttctttcttttttttctttttcttttttttaattatactttaagttttagggtacatgtgcacattgtgcaggttagttacatatgtatacatgtgccatgctggtgtgctgcacccactaactcttcatctagcattaggtatatctcccaatgctatccctcccccctccccccaccctcttttttttttttttttctttttgcagcacctattactatgggacattatgctttctgttaacctgtttcttgtttctgccttctccccatagacagggactgtgatattgtaattcataatcagaaataaatatttggtcttcatccctccccctgtcctggcatccaactcctaaaccccttggaatttcccaagtgatgtctggtggctgagggcacttggacagcctcgggatggaataacctgtgatttttttaatcacaggttaaaaaatctgtgattggagggttggagctttcagtcccacccttcaacctccggggaggagagaggggctgaagtttgagtcgatcaccattgaccagtgatgtaatcagtaatgcctatgtaataaagcctccataaaaacccaagggacagagtgtgaggaacctctggatagctgagcatctggaggttcatggaaggtggcgctcctggggaggacatggaggctccgcccccttccccctcgccatgccttgtgtacctcttccggctggctgatcatctgtatcccttgcaatatcctttacaataaaaaaacaaggcggctgggcgtggtggctcacgcctgtaatcccagcactttgggaggctgaggcgggcggatcacgaggtcaagagattgagaacatcctggccaacatggtgaaaccacgtctctactaaaaatacaaaaaatcccagcactttgggaggccaaggtgggcggatcatgaggtcaggagaccgagaccatcctggctaacacagtgaaaccctgtctctactaaaaatacaaaaaattagccgggcgtggtggtgggcgcctgtagtcccagctatttgggaggccgaggcaggagaatcacttgaacccgagaggcagaggttgcagtgagctgagattgcaccactgcactccagcctgggcaacagaacaagactccatctcaaacaaacaaacaaacaaaaaaacatgactagtgtctctctgagttctgtgagccacggtagcaaattaatcaagccagagaagcaggtcatgaaaactctcaatctctacccgcttggttagagattcagcctgggacttgtgggtgttgcctgaagtgggaggcagtcttgggactgagtcttcatcctgtgggatctgatgctgtctccaggtaggtagtgtcagaattgaattggaggacccccagctggtgtctgctggggaattgcttgatgtgtaggaaacagccccactgacacacacgtatacattatagtaaccaaaggtagaatgtggtgagtgtgagagcatgaacaatggttttgtttctcgtcttctttttttttttctttttgagacagagtctcactctgttgcccaggctggagtgcagtggcgccatctcggctcactgcaatctccgcctcctgggttcaagtgattctcctgcctcagcctcctgagtagctgggattacgattgtgcaccaccacgcccggctaatttttgtacttgtagtagagacgaggtttccctgtgttggccaggctggtcttgaactcctgacctcaagtgatccgcccacttcggcctcccaaagtgctgggattacaggcatgagccaccacacctggcctctcttgtctttcacaggacagtgtctattgtatttattgccatattctcagcatctgggacagggcttggcatgtaacaggtactcagtataaagttttaatttttgttgttgttttttgtttgcttgcttgcttttgagtcagagtctggctctgtctcccaggctggagtgcagtggttcaatctcagcacactgcaacctgctcctcctgggttcaaggattctcctgtctcagcctcccaagtagctgggattacaggcacatgccatcacgcccggctagtttttgtatttttagtagaaacagggtttcaccatatttgtcaggctggtctcgaactcctgacctcaggtgatccacctgccttggcctctcaaagagctgggattacaggcgtgagccaccgcgcctggccgagttttaaaaactgtcagacttgcccggcgccgtggctcacgcttgtaatcccagcactttgggaggccgaggcgggtggatcatgaggtcaggagattgagaccatcctggctaatacggtgaaaccccgtctctactaaaaatacaaaaaaaaaaattagccgggcgtggtggcgggcgcctgtagtcccagctactcgggaggctgaggcaggagaatggcgtgaacccgggaggcggagcttgcagtgagccgagatcgcgccactgcactccagcctgggcgacagtgcgagactccgtctcaaaaaaaaaaaacacaaaaaaaaacctgtcagacttacggaaaggttgcaatagtgcagagttcctgtgcccctctcatccagctgtctctgaacttaacatcctacacaactgcagtacaattgtgaaaaccaagaaatgtgatattggtacagcactgttaacaattttatttgaatttccttcaggaataaaattcactccatgaatgtgcacccagaatgcattgacttatccctccttagtctcctccagcctggaacagtcctcagtcttccctcatcttctatgaccttgatagtgatcagttgtttggtacagtggaacctcgagcaacacagaagttaagggtacccctagccccatgctgtcgaaaacccatgtttaacatttgtttttgttttcgttctggagacagtcttgctctgtcactcagcctagagttcagtggcgcgatcttgtctcactacaacctccgcctcccgggttcaagcaattctcttacctttgcctcccaagtagctgggattacaggcatgcaccaccatgcctggctagtttttgtattttttggtagagatggggtttcaccgtgttgcacaggctggcctcaaactcctgagctcaggcaatccaccctccttggcttcccaaagtgctaggattacaggcgtgagccaccacacccgaccaccatgtttaacatttggtttttgttgtttctgagacagggtcttgctctgttacccaagctggaatgctgtggtgtgatctcagctcacggcagcctcaagctcctgggctcaaatgatcctcccacctcagtttcctgaggagctgggactacaggcatgcaccaccacgcccagctactttttcaaaattttttgtagaaacagggtctcattatgttgcccaagctagttttgaacgcctaggctcaagtgatcctcccacctcagcatcccaaagtgctggggttataagtgtgagccactatgcttggcccatgtttaacattggactccccaaaaacataactactaatagcctactactgactgccttactgataacataaacagttgattaatacatgttttgtatattatatggattatatacagtattcttacaataaagtaagctagagaaaaaaattattcataaatcaagaaaaaaatacattcactgttcccaaagtggaagtggatcatcgtaaaggtcttcgtcctcgtcatcttcacattgagttggctgaggagggagaggaagaggaggggttggtcttgctgtctcaggtgtggtggtgaaggaagaaaatctgagcataggtggacccgcagttcaaacgtgtgtggttcaacagtcaattgtacaatgaagaatggcgatcggctattcagtagaatgtccctcgatgtgggttcgaagggtgttttctcatgataggaacgcggttgtatgtgtgtggcagtgatgctggggaagcgctgtggtggccttctcagtgccccggaccaggggttcatgttgtgtttgtgcccctcacagtggacattagctgtgctcattggacgatactggtgttcactgggctatgatgggtgtctgctctggaagggtatttttccccgttgttgttaataaatgcattaggggaactactttgaatttgcaccaatcctgcctccttagccttccacccactaagctgagcatgcatcggtgggccttggctgcaacaactatttccgcagggtttggtgcttacctaatggtgatttcaattttcctctccttctacattttttattgattggaattctgctgtaaggaagagctgttccttcgctgttgattgatggatggatttcagtatggacttatgggtgtttattttattctattaaaatctgatgtttttgttattttctggcttcaaccttgccacctttggcattaggagctcctttgggttggcacttgtgttatgtgagcaagccccttcctcttctgagcaattccttactttctggcaacccaagatgctccatgctcatctggttcattgcctgccttcgtcctggaatcagccacttccccaaggggccaggttccttttcttggagaatggtgtttagaagccaggacctggttactgggtgtgcttgttgctattgggctgctattgctcttaggccatcttgtaggaaatataaatgggtgtatgaagcctctccccgaacacagctatggttctgcatctgtctgggtgtatgaatgtgaaataccatgattctatgctgacctctccattctagaaagacacttcaggttcattccagccatcctccttccccttctttacagcttctttctccagcagcaggaaacctggctttcatgatctatatttacttatatgtttgatatagtttggatctgtgtccccgctgaaatctcatattgaagtgtaatcccccatgttggaggtagggcatggtgggaggtgattggatcatgggggtggatttctcatgaatggtttggcaccatccccttggtgctgttctcatgacagtgagtgagttcttgtgagatctggttgtttaaaagtgtgtggcatctcccctcacccccttgctcctcctctggccatgtgacgtagctgcccctcctttgccttccaccgtgactgtaagtttcctgaggccttcctagaagcccagcagatgccagcaccatgcttcctgtacagcctgcagaactgtgagccaattaagcctcttttctttacaaattacccagtgtcaggtatttctttatagcaatcctaatatagtgttcaattctagtacacatacaaagagttgcaaacccatagcccattaagaacatatgtattaactagattgcacatttggggacagctcatttcatcttgagcctcacagtatccagtcacgatgttatcttctaaagttactcagtgtggctgggcatggtagctcacacctgtaaccccagcacattgggaggccaaggtgggggtggatcacttgaggtcagagttcgagaccagcctgaccaacatggtgaaaccccatctctactaaaaacacaaaaattacccaggcatggtggcacgcacctgtaatcccagatactcaggaggctgaggcagcagaatcacttgaacccgaaaggtgaaggttgcagtgagccgagatcgtgccactgcactccagcctgggtgacagagcgagactcagtttcaaaccaaaaaaaaacccaaagttacttaatgcgtttttccttccctggcccctttaggtggttgtgttacttatttgttgtttgtagttttgtgtgttttttagagacactgtcttgctctgttgcccatgctggggtgcagaggtatgattatagttcactgcagccttgacctcccgggctcaagctatcctcttacctcggcctcctgagtagctggaactacaggtgtgcaacaccacgcctggctatttttttttttttttattttttgtagagatggggtctcatttcatttgttatttgttaggttcatttgttagtgtttgtatttcattttgggttccttttggatatggcatgaacagtagatactatgggcctgccacggtggctcacgcctgtaatcccagcactttgggaggccgaggtgggtggatcacctgaggtcaggagttcaagaccagactggccaacatggtgaaactctgtctctactaaaaatacaaaatttcgctaggcatggtggcacacgcctttaatcccagctacttaagatgctgaggcacaaggattgcttgatcctgggaggcagaggttgcagtgagccaagatctcaccactgcacttcagcctgggcaacagagtgagactccatctcaaaaaaaaaaaaaaaaaaaaagagtagacactatggatattcttttggactttgctctttttcgcttggcagtgtgtccacaggttactactccatgtcagctcacagaggtctttctcttctttttttccagttgtacagaacttcattgtgtgaacgtgccatagtttacacagctgtgctctcagatatgaacacgcagggagcatccaaacatttgaaatgacaaacaacagtgcagggcctaaccttgtgcctgtgtattttggtattgctgaagctgtaatttcagggtagatacctagaagagtgatcgtaggttagaaaggtaagtgcatatgcagttgtgttaggtattgccaaatttccctttaaaaggattgtgccaatttgtattctcacaagagatgctagtacaagtgttgagactgatgtgtggctagatggctggagagctggctgacatctcaccccgcagcatcaatgttagaaccggtgcttacgcggcttgcagttactagagagagccactagatggcagatacagcccatcacagacaacagtgagcacacctttttccagattttgcttcaggggcctttgataacaattgtgtaagttgaagtaatagaatgtttctaaatgactaatagcacaacaactagctgttttgtaggttgttttttgtttttttgagacagtctcgctctcttgtgcaggctggagtgcagtagcttgatcttggctcactgcagcctctacctaacctccgagtccaagtgatcctcctgcctcagcctcccgagtagctggactacaggcacatgccaccatgcccagctaattttattaattttttgtagagacagggtttcactatgttgcccaggctggtctcaaactcctggcctcaagtgatcctcctgtctcggcctcccaaagtgctgggattacaggcatgagccaccactcaggccacaactagcatttgtaatactagtaggaacagtaacattatttttattagcaagtaacatttttcatttgattattcattcatacagtaagtgtatatttgttctatgtgctgttataggcactgggatgaagagatttaaaaacaaacacaaccatcagcctgcatagagctttcattctcctgggggagagagacagtaaggaaatacaaaagccaaatacatagtctattggggagcgtaggtgctatggagaaagcacagaaggggaatagggtgtgtgtgcgtgcctgtgtgcacatatatgtgcatgcgtgcatgtgtgtgtgtgtgtgtgtgtgtatgtggtgagcagggtagttagtttacaaccttaaacaatgtgatcagggaagggctcactgagaagcagctgactgagagaggaagctgtaaggacaagctgggaggggagggtgtacggcaggaggaatgggccagcagagagcccgcagcaggagcagcctggcatgatggaggtgccagtgcagggagagaaggcgcgagcagcgttggagcggggtgtggaccttggagaccctgtaggctactgaaaggactttggatttgtccccgtgagaaaggagagccatgggagagtaaatcaaatccctcagaagcccagaaagcagctgtcctcagctcactcctctcaccgcagatcacccattcaccaggtacttactgatggctaccatgggccagatgtgatcccaggatttgatcgtgagaggagcttgtgtcagagtgtgtgaaccagagcaactccatcttaaacaggagctgggtaaaatgaggctgaaacctactgggctgcattcccagatggtgaaggcattctaagtcacaggatgagataggaggtcagcacaaaatacaggtcataaagaccttgctgataaaacaggttgcagtaaaggagccagccaaaacccaccaaaaccaaaatagcaaaaagagtgacctctggtcatcctcactgctacactcccaccagcaccatgacagtttacaaatgccatggcaacgtcaggaagttaccctatagggtctaaaagggggaggcatgaataatccaccccttgtttagcatatcatcaagaaataaccatgaaaatgcacaaccagcagccctcgggcctgctctgtctatggagtagccattctttattcctttactttcctaataaatttgctttcactttactctatggactcaccctgaattctttcttgcacgagatccaagaaccctctctgggggtctggatcaggacccctttcctgtaacacttggactctggacccagcgggctctgacaatctgggagtggcgggcaacaagccttccttcccagaaagggcacacgtgcagtcaggtagggctgtgtaccactctgaaatggaccagaaggtctgtggaggccattggcagaaaactagcctgtgcagggtgcccttcagggggtcctcaggctctgatcatgtttgagctacttaacagttctgtaggctgggcgcagtggctcatgtctgtaatcccagcactttgggaggcggaggtgggcagataacctgaggtcagaagtttaagaccagcctggccaacatggtgaaaccccatctctactaaaaatacaaaaactagccaggtgtggtggcaggcacctgcaatcctaaccactcaggaggctgaggcaggagaatcacttgaatcagggaggtggaggttgcagtgaacttagatcacgccactgccctctggcctgggtgacagagtgagactttatctcaaaaataaaaaagaaaagaaaaaaagggaacagaaactgtgtgacttggacagtgggcacaactttgggttccccaccctgcccattcagcctggtctcagcccacctaccttgccagacatccatttgttctctaaatattaactgactcccatgagccaagcaggctctcagcactgagcatgcagaggtaatagaatcctatgagttgtcagcctcttagaggctgttagacaacggggagcagacaacagcaatgacacgggaatatacaatagcatgtcaggagaagatcagcctagaaagaaggatgcaccaggaggaggggctcctgggcttcatggtcagggaagacctttaagaggacactttggaacagagcatgcacagaaagtacaaaggtcctgagccccgctcctgcctaccaagggtacacgctgcccttaattacacattcattaccattgcgactgggtttctgactcacagcattaaaggagaagcttcgggagggcacaacccaccaccatcgggtctccactgccaagcctaggcaatgcctggctcacagtaaatgcttaacaaatgagttattataataatacaaaaatataaacatgagttattatcataactcatttattatataatattatatattagttttatatattacataactaatacaacaaatataactaataatttcacaatgtgaccttgaaacattaaccaaatttttttgtttttgtttttgagacagggtctcgatctctcacccaggctggggtacaatgatgtggtcttggctcactgcagccttgatctcctgggctcaagcgatcctccaacttcagccccctgagtagctgggactacaggtgcataccaccacgctgggctaatttttaaattttttgtagagacgggtctcactttgttgcataggctggtctcaaactcctgaactcaagcaatcctcctgccttggcctcccaaactgctaggattacaggcataagccactgcacctggccactcaatacataaactaagatattaatttgcataagccaaccttactatattagcccttatcttccattagttctcccatttcctggtcactttcctacagtttatcattgcttgaaacccaaaccttatttcctttgttaaaatgctatataaggtcaggcacagtggttcacgcctgtaatcccagcactttgggagcccaagggggatcatctgaggtcaggagtttgagaccagcctggccaacatggtgaaaccctatctctactaaaaatacaaaaattagccgggcgtgttggcggtgcctgtagtcccagctactccggaggctgaggcaggagaatggcttgagcatgggaggcagaggttgcagtgagctgagatcacaccactgcactgtagcctgggcaacagagcaagactctgtgtcaaaaataaaagttatataagcctgaatctaaccatttctttgagttttacttcttttctataaattctcatgcatgtaaatattaacaaaaattatatgctttttctcctgttaatctgtcttttgttactttaatttgcagatcccaggtaccgaactgaagatggtagaggaaaagtttttcctgcttaacatattcaactctctaccctcaatatatttggctgttattattctggtttacatgtatcataatttaaccagttccctactggtggatgtctaggtttccccgatgttttgctattaaaaacacacatggtacacgtttttctagatcgggcagggtttgcccatctccacttcaagcagcacaaccaccatctgccagtgttggggtttactctacagtcagcaaacactgttggcacatccagtcagagaaactgaaaacagaaagcagaaatggcttacactggactaattttagaatttctaagtacatttaagtgatgactcatcccacttaaattcaaagctgtttgttgtgccatctggctcatcagaacatgaaagacttctcctgcaacctggaaaaaggccagagaggaagacgaatggaggagtcaaccccatgggaatgctgactgagtgttagctccccgtggacaggaatgtcactgcatgaataggctgcagtatgtctgggcctgtttttttttcataaaatgttccccccctgtttttttcttattccaaagcaatgcaacaaaaagcacaagaaatcaaaaaggaaaaaatagatattggacttcatcaaaatgaaaaacttttgtgcttcaaaggaaatggaaagaaagtgaaaaaacaactgagggaatggaagaaaatattctcaaatcatcatctaacaaaggttgtgttagtctgttcaggttgctgtaacaaaatatcatttcaggtcaccaggtggcttaaacaacagattcagttggccctccgtatccatgggtttcaggccttcgacttcaaccaacctcaaataaaaaatatttttaaaacccaatacggccgagtgcggtgcctcatgcctgtaatcatagcactttgggaggccgaggcggggggatcacttgaggtcaggagttcaagaccatcctggccaatacatagtgaaaccctgtctctcctaaaaatacaaaaattagctgggcatggtggcgggtgcctgtaatcccagctacttgggaggctgaggcaggagaatcgctggaaccccggaggcagaggttgcagtgagccgagatcgcaccattgcactccagcctaggagacagagccttctgtctctaaaaaaaaaaaaagaaagaaaaagccagtacagcaataaaaaataataaaaatcttaaaacaatgtagcatattgttttaaactatttaaactacaattacttacatagcatttacatttataagtaatctagagatcatttaaagtacacaggaggatatgtgtaagttatgcgcaaatactacacaattttatatcagggacctgatcatctttgttttttttgttttgttttttgttttttgagactgagtcttgctctgtcacccaggctggagtgcagtggcatgatctcagtttactgcaacctccacctcctgggctcaagcaatcctcctgcctcagcctcccgagtagctggaactacaggcatgcgccaccatgcctggctaatttttgtagttttagtagagaagcggtttcaccatgttggccaagctggtcttgaactcctggcctaacgtgattcgcctgtcttggcctcccaaagtgctgggattacaggcgtgaaccactgtgtcagacagagtagactccgtcttaaagaaaaaaaagttttggtgccattccatgcaacgtggagagaaatgtcgcattcaggagggaaggctcccagacacttaactctccactccaggccagctttctggaggcaccagggctttgtcaacgcatagatgaggagtcagccattgagtgtgacagtgtgaggcagtggagaaggcatagaagctggaagctggaagtcctgccttcctaaaccacagctgcttcttaccagctgtgttaccttaagtaggtcccttaacctctctgaatctcatcgcaaagtgcttttcgaatagagcaggatcattgagaggattcagtgaagtatttactcttgaaacccttagcatggagcctggcaagtaccaggtgcttaggaacaatccttcattatcacaccaaaaaaggtgctgtggacacccaaggaaacaaaatcccttcgataaagaattttaaaattttagtcttatgaaccgtgctatgtattctcctgcctttttgacagaatagactgaacatcctttaaccttttttgatggtgcaagatcatctcttataagacaaaaattcaggccaggcatggtggctcatgcctgtaatcccagcactttgggaggctgaggtgggtggatggcttcagtccaggagttcgagactagcctgggcaacataagtgagaccctgtctctacaaaaaatacaaaacttagccagatgttttggtgtgcacctgtggtcccagctactcaagaggctgatgtggaaagatggtttgagctcgggaggcagaggttgcagtgagccaagattttgccactgcactccagcctggtgacagagcaagactccatctcaaaaaaagaaaggcaaaaattccctcagagtgcaaagcttgccagtatttagaaatccaacattagtcttcattcagcaaccagtcattcatttgccaaacatgaactttccctagaactccatacttctttggacgtgtgagacactgccagaataattattcaagcactgtgtgggccaggtgcggtggcttacgcctgtaatcccagcactttgagaagccgaggcaagacgattgcttgagctcaggagctcgagaccagcctggcaacatggtgaaagcctgtctctatttaaaaaaaaaattagccgagtgtgatggtgccctcttggagtcccagctactcaggaggctaaggcgggaagatcatttaagcccaggagatggaggctgcagtgagctgtgatctaccactgcattccagcctgggtgacagagcaagaccctgtctaaaaaaaaaaaaaagaaaaaaaagaaaagaaaagaatgagtgggagggcgaggcgcggtggctcacgcctgtaatcccagcactttgggagtgggaggtgggtggattacctgaggtcgggagttcgagctcagcctggctaacatggtgaaaccccgtctctactaaatacacaaaattagctgggcgtggtggcacacgcctgtaatcccagctactccggaggctgaggcaggagaatcgcttgaacccaggaggcggaggttgcagtgagccgggattgtgccactgcactccaacctgggcgacagtgagactccgtctcaaaaaaaaaatgaagtactggtacctgcaacagacacaaaagccacatattatatgattccctgtgtgtgaaatgtccagaagaggcaaatccatagagctgacaagtagaatggtgattaccaagagcttaggagaggaagggctaatggccttgaggttctttttaaggtgatgagcatgtttatttggagacagagtctcgttgtgttgcccaggctggagtgcagtggtgtgttcacagctcactgcagcctcaacctcctaggctcaagtgctcctgccatctcagcctcccgagcagcttggaccacagggctgaaccatcacccccagctaattttttctgttttttgtaaaggcaaggtctcacaaaatcccaacatgctgggattacaggcgtgagccaccatgcctggcccctactcattcttttttttttttaagatggagtcttgctgtgtcacccaggctggagtgcagtggcacaatcttggctcactgcaacctccacctcctgagttcaagcaattctccctgcctcagcctcccgagtacctgggattacaggcgcctgccaccacgcccagctaatttttgtatttttagtagagatggcgtttcaccatgttggccaggttggtctcgaaatcctgacctcaggtgatccacccaccttggcctcccaaagtgctgggattacaggcatgagccaccgcgcccagccgcccctactcattcttaatcacaccacctgactttctccacattgatcacattaggatattatcttgtttatttacagaaaatctgtgtccctcttcagtgcactggactcttcggtgcactggatgctcaatgcaggcactaagttttgtctgacttaccactggttgtatgccctgctcacagctggtgaatgagtgattggaaacacacctgctcccttgatttaggcctctgggaaacaagggcaaggtaagttcaggaagaagaaagacctcgtaatttccaggtaggaaaaatcctttggtgtggccgtgagacactgcattcttcttggccacagctccctctgctttgagaatcacataatcaactttatctttctctgaatcgttcacataaaagggaggtgttggaacacaaggtggaaatgggtgtgttggcggtggctgaggaagtcggggcaggaggagccactgtttctgggaatgaattcctgaaacttgctggtcccaccaagatgcaaatcttgcggcagtttttacagttatcctgtggaagaagtgaggatcccactccaagcccaggtcagaatgctgataatcccctctgatcaggtttttttaattttatttttattttttgtggtttggggaagatttgccaactgtatcctcttttctggcaaggaaaatttatatctgcccaatgaaatcaggaatttaacttcattcattcaacagttatttaattctatcctctactagattcctacagctgctgtaaccctaaagtaccacaaactgggtggcttgaaacaacagacacgtagccaggcgcagtggctcacgcctgtaatcccagcactttgggaggctgaggtgggcagatcatctgaggtcaggagttcaagaccagcctggccaaaacggtgaaaccctgtctctgctaaaaatacaaaaaaaattagccgggcatggtggtggcgcacggctgccattccagctactcggaatgctgaggcaggagaaccgcttgaacctgtgaggcggaggttgcagtgagagcgagactctatctcaaaaaaacaaaacaaaaaaccccaacaacaacagacatgtatcctctcacggttctggaggccagaagtctcaaatcaaacgattagcagggccatgttctccctccacaggctcttggggagaatgtttctctgcctttctcttcgctgctggtgttgctggcagctcttggcactttttgggtgtaggctcatcactccagcacctgccctggggtcacatggctctctcctcactgtgcctcttctttttttatttttgagacagggtctcattctgtggcccaggctggagtgcagtggcacagtctcagctcactgcaacctcctcctccccaggctcaagtgatcctcctacgtcagcctcccaagaagctgggacttcaggctcatgccaccaagcccggctaatgttttgtatttttagtagagagagcagtttaccatgttgcctaggctagtctcgaatacctgagttcaagtgatctacttgtctcagcctcccacagtgctgagattacaggtgtgagccactgggccgggccctcctctttttttaaaaaaacaaaacaaaacaaaaacatttattttaagttcaggggtacatgtgcagctttgttatacaggtaaacttgtgtcacgggggtttgttttacagattattaatttcatcacccaggtattaagctagtatccattagttattttttcttttttgttttttttttttttttgagacagagtttcactcttgttgcccaggctggagtgcaatggtgccatctcggatcactgcaacctccgcctcccgggttcaagtgattctcctgtctcagcctcccgagtagctgggattacaggcatgagccaccgtggccagcctagttattttttctgatcgtctccttcctcccaccctccacccttggccagaccccaatgtgtgttgttcccctctatgtgtccatgtgttctcatcatttagctcccatttgtgagaatatgcagtatttggttttctgttcctgcattagtttgctaaggataatgacttctagctccatccatgtccctgcaaaggacatgatatcattcctttttatggctgcatggtattccatggtctatatgtagcacattttctttatccagtctatcactgatgggcattgaggttgattccatgtctttgctattgcgaatagtgctgcagtccttttcttctaaggataccggtcatattagattatgggtccactctcatccagtataacctcatcttaaatgatatcttaattatatcttcaaagaagtaaggtcacactcacaggtactggggttaggacttcaacataggttttttgggggaaactattcaatgcctaacacaacctctccaagaaaaaaatcttactgaaattttaattggaattgtattcaatttatatcataattgggggattttgacttttgtgttttttttttttttttttttttgagacagagtctcgctctgtcgcccaggctggagtgcagtggcacgatctcagctcactacaacctctgcctcctgggttcatgccattctcctgcctcagcctcccatgtagctgggattacaggtgcccgccaccatgcctggctaatttttgtatttttagcagagacggggtttcaccatgttggtcaggctggtctcaaactcctgacctcaggtgaactgcacgcctcagccttccaaagtgctgggattacatgcgtgagccaccatgcccggcaactttttctttttctttttctttttctttttttttctttttttttttttgagatggcgtcttgctctgtcacccagactggagggtagtggcgccatctcagctcactgcaacatctgcccccccgggttcaagcgattctcctgcctcagcctccaagtagctgggattataggcacccgccaccatgcctggctaatttttgtatttttagtagagatggggttttgccatgttggccaggctgatctcgaactcctgacctcaggtgattcacccactccgcctcccaaagtgctaggattacaggcatgagccattgcgcccagccaaatttatttctaagtgtttcatagtttttgtctgcatgctgaatgaaaatgtttcttatttaaatttctaggtgtttattgctacagtgtgagaaaactattgtgtggttttttttgtttgttttttgtttttttttaagatggagtcttgctctatcgcccaggctggagggcagtggcttgttctgggctcactgcaacctccgcctcctgggttcaagtgattctcctgcttcagcctcactagtagctgggattacaggtacccaccaccaggcctgtctaatttttgtatttttcgtagagatggggttttgctatgttggccaggctggtctggaattcctgacctcaggcgatccacccacctccgcctcccaaagtgctggcattacagaagtgagccaccacgcccagccttgtttgatgtatatttatcctgagactagccatctaaccaaactttcttatttattccagtgttttgaaaaaataactagtatgttttgagttttctaagcacacagtcctataaatagagaaatgattgaatgttgcatcttagaatattttgcaggataggaaaaataacctagggctatctatcagctggccatgacagctttccacaaggtagtgttaactaaggaaagcaagatgtaagaaagaatgcttaatataatctcagttttgaaaaacaatgagtgggccgggtgcggtggctctgccctgtaatcccagcattttgggaggctgaggccagcggatcacgaggtcaggggtttgagaccagcctggccaacatggtgaaaccccgtctcttctaaaaatacaaaaattagctggtgtggtggcacgctcctgtagccccagctacttgggaggctgaggcaagagaatcacttgaacctggcaggcggaggttgcagtgagccaagctgcaccgttgcactccagcctgagcgacagagcaggactctgtctcaaaaaaaaaaaaaaaaaaaatcagtaaaaggcaatatgtgtgtattaggatatatggttttttctttggtttttttgtttttgttttgttttttgagacagagtttcgctctcgttgctcaggctggagtgcgatgcgcaatctcggctcactgcaacctcccgctcccgggttcaaacgattctcctgcctcagcctccctagtagctgggattacaggcatgcaccaccacgcccagctaattttttgtatttttagtagagacagggttttgccatgtttgtcaggctggtcttgaactcctgacctcaggtaatccgctcacctcggcctcccaaagtgctgggattacaggagtgagccactgcactcggccaggatatatgttttgtatatgatttcacattcatagagaaaatacagaattttaggttaacatgagccactttgtgtaggtggggaactaacatgggggcagaaaggagaagagaaggagataagcagaaagtgaaattaaacaacctgccaaaagatccaaaatcattatgacatggtcacatttatgcatgtatgtaatttatgtgtgtgtgtatacatatatatttgtatatgttcatagaaatttaaaataatttcttttttttttttcttttggagatggggtcttgttatgttgcccaggctggtctcaaactcctgggctcaagcagtgctcccaccttggcctcacaaagtgctgggattacaggagtgagccactgcacctggcctaaacatttttttttttttcagatggggttttatgctgttacgcaggttggagtgcagtgctaccatttcagctcactgcaacctctgcctcccaggctcaagtgatcctgccacctcagcctcctgagtagctgggaccacaggcatgccccaccatatgtggctaattttttgtatttttggtagagacggtttcaccatgttgcctaggctggtcttgaacttctgagctcaggccatccgcccacctcagcctcccaaagtgctgggactacaggcgtgagccaccatgactggccctaaaataatttttaaatgaacacaaaaacaagcaaacaagcaaaatgtagataaagtggctgttgaagacaggccttggctgggttctggaatagccgagatgaggaaggctgcaccctcaaggacaccccacagagaacctctgactgctggtgacaggaggaatgcaacgacaacggagggtcccactcaccagcatccgtgccctgtgttgtcacagcagcccagttttcctttggggaaccacctcatctccccatcccttctctatcacctgcactgtgtatcatcttggtgggaccatcaagcaagacactgcccagtggccccgtgcggtgtggctcacgcctgtaatcccagcactttgggaggccaaggcgtgcagatcacttgaggtcaggagttcgtgaccagcctggccaacatggtgaaacgccgtgtctactaaaaatacaaaaattagccgggcatggtggtgggcacctgtaatgccagctgctcgagaggctgaggcaggagaatctcttgaacctgggaggcagaggttgcagtgagccgagatcacgccattgcactctagtctgggcaacaagagcaaaactctgtctcaaaaaaaaagaacactatgctcagccccagcagaggtggctgagtcttcagggcagccagccagatgctcctctggaaatgtgactcaggaatgaagggccaagcacagttgagcccaagctctcaacatgaaggcctcttggtcttgctccttaaaaccaggaggccgggcacagtggcccacgcctgtaatcccagcactttgggaagctgaggcaggtggatcacctgaggtcaggagttcgagaccagcctgactaacatggtgaaaccttgtttctactaaaaatacaaaaagttagccaggtgtggtggtgcacacctacaatcccagctactcgggaggctgaggcagaagaatcacttgaacccaggaggcggaggttgcagtgagctgagattgcaccagtgcagtccagcgtgggtgacagagtgagactccgtctcaaacaaacaaacaaacaaacaaaccacactaaataattatgagaatgcaaagtgaaagctggagcaagcagaattaaggctcaggaggagggtgggtctggatctgggaggatcacaaaagcaagccaactcccccaggcctaagggagaccagcttgcagttagacacaactgagggaaatgggctgacatttcctgtatcttccaggtgtaagccccagagaaagcaagtcactggatcaggaaccatggtctcctggatccaaatctaggcttttctcccagaaaggacatctgccagggatgcctggtccaggtggtggaggctgggtggctcaccgttctgtggtttccgtcttcgtggagagtttattccctcacgttgatgatgacggaagggcagggcttcttcaaggtggctgcttcactggtttgtgatccacccagtgtactcggagagcttctcgccacactttttctgtaatttgccagaaatagtaaatattttaggcttcatgggccgtctgttctctgccacggtgctagactttgttgtagtgacagcagccatactgtttacatattatctgtggcagcttttgacaccatatggagtagaaagcctacattttgctatctggttctttacagaagaagtttgccaaccctgtcatatagtatgaacatctttcttaccaccatcttttttttgagatgaagtcttgttatattgcccaggctggaaacaaactcctgggaccaagagatcctccccattcagcctcccaagtagctgggactaaaggcacatcaccaagccctgctgcttaccaccaattttttttttttttttttgagatggagtctctctctcgcccaggctggagtgcaatggtgcgatctcagctcactgcaacctctgccatccgagttgaagcaattctcctgcctcagcctcccgagtagctgggattacaggggtgcgccaccacgcccagctgatttttgtatttttagtagagacggggtttcaccatgttggccaggctgttaccaccatttttaatggctgcattttgtttcccttccaccaatgcttccaaagctgcttagtaatgacattcaaaacagaatctgccaagataagacaccttttgaatagcaataggaaaagtatctgcaaatcctgacttctcaaccagccctgccctagtgtctaagctccgacgggctgaaaaatgggcattttctaagtcatttctcctgatccaagatcttgaaactcttcaaacttataaattaggccacctgctgagcaatcctgtaggccctgtcctaagatgactcagggcagtctcttcttttccctgtaacctggtcctattcacgtgaagctatttttcagctatttgcaaaaagctccttaaaatctatttttccctttaattatagtttgcagctggtctttctgaaagcaaagaatttattgcttgccaagggccattaaagatcaagctgggttagggggtctccttgctgaatccagggaggagggttcaagacagaggctatttccgaaccagtttttctagttcccaggcactctccggattcttctctgggtttacttttcttaggtggaaaccctacctagatttgcaaatgacgtggagctctttgtcacccaagatcccttggggctcatgggtcagtcattgtttggaaagtgttgcctcttaggcttttctatttttataaaagagggattactgtctttgctccctgtaaccttggactactgccaagttttcttggtggcattttcacttgataaatatgagcctttctgctcctgacccagaagagtgcttctcctagcagtctcaggagtttcagacctagttatacccctgcatttatcgcctcagacatgtcaaatgcagatgtcacctcccaaccaacttttagacacattggtggagccagaaagatataaaagattatcattatgctaattttttaaatgtacagaactgccctttttaatctttaattttggagttttagccacaactcctttaaaataaaataatataataattttttttttttttttgagatggcgttcgctcttgttgcccaggctggagtgcaatggcgtgatctcagctcaccacaacctccgcctcccgggttcaagcgattctcctgcctcagcctccctagtagctgggattacaggcatgtgccaccacacccagctaattttgtatttttagtagaggcggggtttctccatgttggtcaggctggtctcaaactcccaacctcaggtgatccacccacctcggcctcccagtgttgggattacaggtgtgagccactgcgcccggcctataattttttattattaaatgatcattagagaataaataacactgtaggacaaattttccccttccatttttttttttttttttagatggagtcttgctctgtcacccaggctggagtgcagtggtatcacctcggctcactgcatcctctgcctcctgggttcaagcaattctcatgccttggcctcccagtaggtaggattacaggtgtgcaacaggcccagctaatttttataatttagtagaggcaggatatcactatgttggccagactggtcttgaactcctgacctcaagtgatcaacccgcctcagccttccaaagtgctaggattacaggcatgagccactgtgcccggcccccccgctttttttttttttttttttttttgagagtgtcttcttctgtcgcccaggctggagtgcattgttccatcatggctcactgcagcctcgacctccaggactcaagcaatcctcccaccgcagcctccccagtagctgggattacaggagtgcacaacccctcacccagctaatttttgtattttttgtagagacagggttttgccatgttgcccaggctggtcttgaactcctaggctcaggtgatccttctgcctgggcctcccaaagtgctgggattacaggcatgagccaccgcacctggctaaatccaaggatttttgtatccacgggtggatcctggaaccactgcgccagggataccgaggaatgattatacagaaaaaggaaattttctgtatacaaggagaacccagttggaaacacctcagcatttgccttatttgaacacagtttaaacatttggctgcctgcaactaactgaagctcagctagctattggttaaaagaatatactcctaatttagcctctcagttaatttatgtgttatgttaggttacagttcattacataaaggccaaagtatggaagcctcctcaggccaaatttagtttaatttaacaattcctcccttttggtcggtctcaattttgagagactgaccaaaaccttgacactactctctgtcaccatcatccgactaaatacggaacttacttagtctctgtatacaattcacaagtcacaacagttgaacaattctttatcttctggcagatctagttcaaatgagaccgttcaacatttgacgaatgattgtatacaaacatttaagatgtgagaggataggatacggtgcaccaggaggactattataatggctgtcaggagggttacaccaaaaagactgaagtgtactccttaacaaaagcttgtaggaactgaacccatccaaatcaaagttcaggcaatatagacagctcaataatatttggccatggtctgtattctggatttgatggcaattaaggactatagtttggtgtaaaatggcctgatttaaagaggtatctgtttttgttgttagcctgataatacaggctgtagcaatctagagacttaccaagagaacaagatgagaaaagcttggaaacaccaagctggccatccaccgctgaggaggcccgtggaccaactggtggctgctcccataaacacatcatctgttccttttccttgagaaattctcttttttattgttgttgttacattggcaattttttttttttttttttttttttttagctagagtctcgctctgtcacccaggctggagtgcagtgacgcgatcttggctcactgcaagctctgccttccgggttaaagtgattcccgtgcctcagctgcccaagcagctgggattacggatgcacaccaccatgcctggctagtttttgtatttttagtagagacaaggtttttgccacgttggccaggctggtctcgaactcctggtcttaagtgatcctcccaactcggcctcccaaagtgctgggattacaggcatgagtcactgcactcagccatgtcttgagaaattttcttagtgtatttggtagcagtgtctaaagaaacaacagtatcagccacctttttttttttttttttggaggggtggacagagtcttgctctgtcacccaggctggagtgtgcaatctcagctcactgcaacttctgcctctggggttcaagcaattatcctgcctcagcctcttgagtagctgggattacaggtgcacgccaccatgcccagataatttttgtatttttagtagagacggggtttcaccatgttggtcaggctggtctcgaactcctgacgtcatgatccgcccactcagcctcccaaagtgctgggatcacaggcgtgagccactgtgccctgccttcagccacctttttaattaagctttctgtagtaggaaaatcaaaagaaaaatagatacaatattccgttttcttaaaaaccatatacaaggctccgacttgagacagaaggagatctaaagcaggatgctctgctaggtgtttttgttgaacacatgtattatcacccactttttagaaagtggcttctacccctctgaacagcagggaggtctggctgactgcaaggtccaaggtgtttccccagtttacagatgagtgtcaaattctatactactagtgtcccacaactgccaagagtgagcctccagaaacctcactggaatctttcctcgatgaaactaacttgtcttcataaaccccataattgctcaggtttttgctaaagcataaaccttagctaaggccattcataaactatggttccatggattttcctggagagtaaaggaaaggattaagacagcaaaaaatgaagaaaagaaaaagaatgctgggtgtggtggctcacgcctgtaatcccagcactttgggaggccgaggtggatggatcacctgaggtcggggggagttcgagaccagcctgaccaacatggagaaaccccctgtctactaaaaaaattagctgagcatggtggtgcacgcctgtaattccagctacttgggaggctgaggcaggagaattgcttgaatccgggaggcggaggttgcagtgagctgagatcatgccattgcactccagcctgggcaaccaagattgaaactccgtcaaaaaaaaaaaaaaaagaaagagagagagagagagaaggagggagggagggagggagggagggaagtaaggaaggaaggatggaaggaagaaaggaaggaaggaagggaaggagggaaggaaggaaggaaggatggaaggaagaaaggaagggagggagggagggaaggaagggagggagagagggagggaaggaaggaagggagggagggagggaaggaagggagggagggagggagggagggaataaggctttcctgatggtagaggagccttgatcttggaaaagccgtccaggtctagaacaccatctgcttctggggagaaattttccccagctagctttacattaaagtctctaacggaggccaggagcagtggctcacacctgtaatcccagcactttgagaggccaagatgggtggataacttgagggtcaggtgtttgagaccagcctgaccaacatggtaaaaccccactcctggtatcaattttctgtgttagtttgttctcacactgctataaagaactacttgagactgggtaatttatgcagaaaattaatttaactaactcacagttctgcaaacttaatgggaagcatgactgtgaggccttgggacactgacaatcagcagaaggtgaaggggaagcaagcaccttcttcacaatggcggcaggagaaagatatagtgaagggggaactgccacacacttttatttacttttttttttaatttatttttttgagacggagtttcactcttcttgtccaggctagagtgcaatgacacaatctcggctcaccgcaacctccgcctccccggttcaagcgattctcctgtgtcagcctcccaagtagctggggttacaggcacatgccaccacacccagctaatttttgtatttttagtagagacggggtttcaccatgttggtcaggctggtctcgaactcctgacctcaacctcccaaagtgctgggattacaggcatgagccactgcactgggcctgaatttactttaatttaacagaatgcaattatgggcaatgagataaagaggaaaatgttctgacatttctagaaatttgctcacacctatatgaaatcttactttctttcattatctcacctgatactcataaaaactttgtgcaagggattttgaggagtactaatatttaggagagttgggcagatgaacaactaacaaaggtaaacaatcgaaagatccaagaaaccaagtgacgttattgtttcaaagaggcaccgctccacaatttcaaaggctgctgagaaattaagaataagaaggtgacctgtgtgtggctgatagatgaacaaaatggaagctattagtgagcttggtacctttcttgagccgtattgcttattcatatctcattccatttgtcttgatattctgcccagaagctgggaccatgctttgcacatggcaagtgcccattttatgtctgttagtagcagttttgctgagtgactgaaaccagagacttagcagagatgggtgtgctcagagttggcctccactctattcccattacaaagcaaaatacaatacaaagcaaaatacaaatacaataccaatacaaagcaaaattcccattacaaaaactcatcgccagacagttctacttacaggaatttgtcctaaagacagttcccccaaagcctgagatgctctacttacaaggatattaattgcaatgctatttgtaatagcaaaaggcgggaaaccacctaaattccaccaactagagattgtgcaataagctgcaaagcatccagtcagtggggcaataggatgcccctttaagaaagaacaaggctggccgggtgtggcggctcacacctgtaatcccagcactctgggaggctgaggcaggcagatcacctgaggttcaggggttcaagatcagctgggccaacatggtgaaaccccatctctaataaaaatacaaagattagcctgatgttgtgatgcgtgtctgtaatgccagctacttgggaggctgagacatgagaattacttgaacctgggaggtggagggtgcagtgagctgagatcataccactgcattccagcctgagggtgacacagtgagaatctgtcaaaaaaaaaaaaaaaggacggaaagaaagagcgaacgaggctgatgcctctgcactgagatggtctccacgatgtatttgaaaagtggagagaaaagagggcagaaccttacggagggaaaaaaagacaattaaaagaacagctgggccagatgcagtggctcatgcccataatctcagcactttgggaggccaaggcaggtagacatcttgagctcagaagttcaagaccagcctgggcaacatagtaagaccccctccccccaaccatctcaacaaaaaatacaaaaaatagccaagcatagtggcatgcctgtagtcccaactgcttggaaggctgagacaggaggattgcttgagcctgattgaggcttcagtgagccatgatcgcgccactgcactccagcctgggcaacagagcgagaccttgtttcaaaaaaaaaaaaaaaaaaaaaaaggaattatttcaatggatcttgcagtattgactggatagaaggctggaagccaataaagcaaagagaatacaaatagactgactgttctagaaattctatgggtaaaggaagaagggattaattagaaagcatacatttatttatgtatttatttattgagatggagtctcgctctgtcacccaggctggagggcagtggcgcaatctcggctcactgaaacttttgcctcctaagttcaagtgattctcctgccccagcctcctgagtagctggaattacaggcacccaccaccctgcctagctaatttttgtatttttagtagagatggggtttcaccatgttggccaggctggtctccggacctcaagtgatccgcctcccaaagtgctagaattacaggtatgagccaccgcgcccggccagaaagcatacattttttatttagattgtatgcttatctggcgtggcttgatacgggggtgctgatggggattgggaggtagagaaataccctcccaataataatagccaaacgcaacatagcacttgtgatattttctgtgaattttattagtatgaactcatttcaacctcctaacaaccctgtggggcaggtccttttcatacccccatttgtgaggacacagtggcctttctaatatcacacaccagcaagtgtcaaagcttcaaacccaggcagcctggtcacagagagtcacataactgctctgcaaacctgcctccctctgcttcagaggggctcagattcggggtttacctctcactagctgggcaagcttaggcactggccttctcagagccttggttttctcgccgcagaatgagggtaactgcagagttgttgagaagcatttgaagcacctgattcttggtgctcaatacagggaacgtgtgatagttactgccgacttagagcagagcttaggcaggcactgcaccaggatttgactattgatgcatctccaagctgagcctcggtaggcctgtggtcccatgctagagagcagctgccagtgcctccatctgctgcaaagcttggctgtgtgtggatgggtgggacaagtcactccagaagcttctccccttaagacatcctgacattaagggatcttcttcctttgctcctctttctgtcctccctgccccccttcctccctccctttcttccttaaatgcccaaagtcagttgataccttttcttaagtaactcaataagcaatacaggcagtttgctcatggttggcagtgggcaggattaagggaggattagggccctttgtcaatgtctcatctcctgtctgcagagacaagacctgaaggattgctaaagaatgcccttggtaacaactgtttctccaggaccttgtttggcttccccctggctgggtggaacccgctgtgtgcagccttcgcagggaggtgggccgaaggctgccaacgttggagcaggtgagctatggcatttgcattgggctgggtctccattcttgggccaaatcaactcacctcttgggcgagttgcttcagacttcagaaacaagccacatcatgccgagaggctttccccccagttccagggcccaagggtgcaggcacatagccagcccagccttctcttccctgtgtgttcccttctcccctgggtttctcctcccttgtgaagaaacagcacacctgcttttacacaaggccagtcctccacgggcgccctcatcccaccccttttgaccttctcaaggactacaagtctctaatgatcctctccctctcctgactcatccatctctccctctcccttgtgactcagcagtgtacagacctgcttctagattaaaacaaaaacagaaacccctccgaccaccccctccaccttttttcctgcttttcctcagagacaaacttctcagcaccccctgcctcctttcctcaattcccgtccattctccagcccacttccagctggctttggcacccactgtccctcctctcagattcactcttgtcaaggtcaccaggaatacccggtgcacagtacaacaggcacttccatgtcctcgcgggatgggtcttcccagctgcacttgacgcagctgacccagggtgctcccctgcttcccctcctggggcacgctcatggctttcccgcctcctccctctgaccctcctgcctcctccctctgatcctcctgcctccttcctcggacccagggcgctctcctccctcctctcctggaacacgctcatggctttcccacctcctccctggccatctcttctcagtcttcatttccaacttttcctctttctgttctctgaatgttggctttctgcatggctaagccctgggtccccctctagctagactctcatgggatggtctcatccatggccaaggtttttaacataatctagaagctgagactcccatattgcatctctggtcttgctgtcaactcacatgtccgtggcctgctggatacccctgttctgtctcttgggcattccacacttagtgtttcctaaatcagactgtccagggccttccacattggtttgctcccagtctcccttggagccggcactggtgccacccttccacctggtgcctggctgccaagcttgattccctcctcctcctccctaaaccctcccctcctcagacctcactttttccatcctcacattgccaccctaggccaggccaccatcagctcctgcctggacactgtgacagcctcctaagtgatcgacagcccccatttttcacgctgctgccattgagatctttctagaataaaaatcaaatcaagccagtcccttgcttaaaaccatttcacgctccctattgctcttcaggtgaagctaacctccttaacttggtttacacagcccttcccagccagcccctccctgcctctcccacctccagtgccacccccagacctcaagtgatccacccacctcagcctctcaaagtgctgggtggtggctcacacctggcgtcgtcctcttcctcccttcctcttcccctgccccttccccttgccctcctcctcctcctactcctccttcttcctcctccttcttctatgagtggtcagttattccaatgatagattacagaattggcttctgcctttcaaaaattaaatcataacccatctcctgaagtttgaacacagccttgcctaattttgtttcatttatgttattgttatcactacagttatttggggtggcctgaggacacggctggagctggagtgtggctgtgacctcctcttgacatctttctgcaccactattaatggtatcccaagtgctgggcacagaggaggagatagatcaatatttgatgaataaatggctgggcgtggtggctcacgcctgtaatcccagaactttgggaggcctaggcaggtgaatcacctgaggtcaggagttcaagaccagcctggccaacatagtgaaaccccatctctactaaaaatgcaaaaattaggccaggcggggtggctcacgcctgtaatcccaacactttaggaggctgaggtgggcagatcacctgaggtcaggagttcgagaccagcctgactaacatggagaaatcccatctccactaaaaatacaaaattagccaggcgtagtggcacatgcctgtagtcccagctactcaggaggctgaggcaggaaaatcgcttgaacctgggaggcggaggttgcagtaagccgagattgcgccattgcactccagcctgggcaacaagagcaaaactccgtctcaaaaaaaaaaaaaaaattagctgggcatggtggggcatgcctgtagtcccagctacttgggaggctgaggcaggagaattgcttggacccaggagacggaggttgcagtgagccaagatcacgccattgcactccagcctgggcgacaagagcaaaactcagtctcaaaaaaaaaaaaaaagactttgatgaataaatgaatgaacgaatgaaatcactctcaaaccagagcttcaagtttcatgttattggcctggagcggttaattttatcagcatacacaagactctcagtctccaaatcatggaactataggatggcaggatgggagaatccctggaccacccagggcccaacctccaaatttatcagttgagccagctgagccattgctcacccacagttgtcccggagcaggcaggctgcctgcaggatggaagaacgtggaggaggaagggtgtgcaggggccaggtcttacctggatttgttgattttattctcaatatgatgagaagtcccgagagactttaacataatccctgatcttattttattttattttattttattttaaagatcattgcaatccctgcaaaaccagattcaggactggagagagaaaataaggtatgggctggggagtcaacacacatttgtgcctctttgatggcaaggcctaggaacacatgcctggggtcagcttgccatcatgtggccaaacctaaggactgcacatctcccatcttgctttcccagggctccgtgtacttgtggagacaggatttggacccaggtctctcctcccaccaaagttcagggtctataggcctgagttcaagtcccggttcctgcactcccagccatatgaccaaagaggattcaggttctgtatccgactcatggggacagcaacacactcatctctcacagtgaagacccagtaagaaatggcagctgtcagccaggtgcagtggctcacgcctgtaatcccagcactttgggaggccgaggcaggcggatcacgaggtcaggagatcgagaccatcctggctaacacggtgaaaccccgtctctactaaaaatacaaaaaattagccaggcatggtggcgggcacctgtaatcctagctacttgggaggctgaggcaggaaaatggcatgaacccaggaggtggaggttgtagtgagctgagatcgcaccactgcactccagcctggcgacagagtgagactctgtctcaaaaaaataataaataaaaggccaggcgcagtggctcaagcctgtaattccagcattttgggaggccgaggcgggcaggttgcctgagctcaggagtttgagaccagcctgggcaatatggtgaaaccccatctctaaaaaaaaaaaaaaaaaaattagctgagtgtggcggcgtgtgcctgaagtcccagctactcaagaggctgaggcaggagaattgcttgaacccgggaggcagagattgcagtgagccgagatcgcaccactgcactccagcctgggtgacagagtgagactccgtttcaaacaaacaaacaaacaaaaaaaataggggctgggtacagtggctcacacttgtaatcccagcactttgggagaggattgcttgaggccaggagtttgagaccagtctgggcatcatggtgagacctccatttctattaaaaaaaaaaaattataataagtaaatgtctaaccaccttatcttagggaggaagaaactgaggctcagagaaaagcaggtagaaagcaagatttctcgggccaggcacagtggctcacacctgtaatcccagcactctgggaggccaaggcaggcggatcaccggtcgggagtttgagaccagcctgaccaacatggagaagccccgtgtctactaaaaacacaaaattagctgggcatagtggtgcatgcctgtagtcccagctacttgggaggctgtggcaggagaatcacttgaacccgggaggcggaggttgtggtgagctgagattgtgccattgtactccagcctgggcaacaacagcgaaaccccgtctcaaaaaaataataataataaaagaaagaaagcaagaattctcaaggctctgttcaaaatgcaggacttccactccccaggtcagcagtgagcccaaggctctagctccagcggaaggctggacagtgttagggccggaggtgccaggcaggcaccccagaatgagatgcagaaacggccagtgaggacagaagccatggtgctttggaagcccagctccttcttcctgctgatgaacaggcatccagagagcctgtgagcggggctgtgtgctccaggtcatgtcccaggtgtacagaatttcaggaatttagtggagctctcgcccagcaattttttgctttacaggagaggaagctgagatcctgaaagaggtggggcccggcccagggtcactcagcaattttcagtagctgctccctactggggaactgtgtgtctgaggtcgtggccatctgtccaaagagcttcttctgaccaaagtgctcattttcatagtgtgaccacagaggtatgtattttataaccttacctcatttcatcatcccagcagccttgcagggaggtttatttccattttgcaaatgaggactctgaggctcagggaggtgacgtgacatgcgcaaggctgggaggggtgggtgaggacttgccctgtctccactggcctccagaccctgcgctcacagctggtcccgtgtggcattacaagaacatttgagcttctcaggagggttaataaagggtgtaagaaaggacagatctttaggagggccgtcttcagagtttacttctctgtgttctagagagaaccaacgaccctcatgcattgctttttggcaagggaaatgaaggattcaggacagtgggcactgggcacccacagggtttattcaagcagccgaagctcctgcttcagaaccttggcacggttagggcccaaataagggtcttttccttctcactttgaacacagcctcgcctaattttgtttcatttatattattgttatcactgcagttatttggggtggccacccccatcccacagctgctcccacccttctctgctgtagaaatggaggagggaaggcccagtggctccagtgtgaggggaagagacctgactgcacctgggctgtgtcttctccgtccacagtacacccgtgggaagaggagtcggggcatcccttgctggaaataccccagccctgaaggttgctggcaaaaccaccatttaattcagaacaaaaagtctgctccaggagcccctgagagcgtcaaaaagaacaaggtgggtgggttggggggaaacatcactgagaggctacctaggcctggatccccggcagatgcaggtccacaacccgacgccgaccactggccggccctcccgagtgtctgactgcgggactacctggcatccactcgaagagaccagcctggggcatccctccctgcgccccaacccctgtggacactccctcgggagcatttctaactaggcctgggtatgtgaaaaaagaggaatcctttcgcagaaggcaggctggacctgggaaaacagttctccatggatggagaagtgaggggataaaggatgatgaacttagctgttttctttcctgtccacattgtttctaggttctttggaaccaggggtcatcttttatctcccacagtaactcatgtctgccttagacttatttccaacccctcaagatcagttgaagatctttgtaggatctacacattcatactttacttactgacaccccacaacctgtaaaccataacaaaatgcacctgctgcacacatctgaaaggttttctttttttttgttttgttttgtttgagacagaatcttgctctattgcccaggctggagtgcaatggcgtgatctcagctcactgcaacctctgcctcccgggttcaagtgattttcccccctcagcctcccaagtagctaggattacaggcatgcaccaccatgcccagctaatttttgtatttttagtagagacagggtttcaccatgttggccgggctggtgtcgaactcctgacctcaggtgatctgcccgccttggcctcccaaagtgcttggattacaagcgtgagtaccatgcccagccaacattttctttgctataaaatgttttaaaatgtataactgagttttgccagctgaatatagttcaatttgttcttgtgattcaaactttattatgtttttatataaagctatatcaagaatccaaaaacattctatacatttggaagtttaaagacaagcctctaaataggtcacaatcaaagaggaaatcacaatgtaaatgggaaaatacctagaactgaaggacaatgaaaaccctacctagttaaatgcgtgggaggcaggtaaggttgtacctaagagaaaatatatggccttaaataaatgcacatatataatcaggaagaaagaccaaaaaataatgagttaaagtttcaactcaacaaattagaaaaggacaccagagtaaatccaaagaaaatgaaagagaatgataaaaataatagtagaaattaattagaatgcactcagagtatcaacaaaaccagaagttggctctttgaaaatgaagacaaataactaagactaataactaagacaaataactaagatattatttatgaaaaaaaagaaaattatacattttatgaatggaaacagaggcactacagacatggtagagattaaaaaataaaaggacaagccaagcacactggcatgtgcctctaatcccagctacttgggagactgagacaggaggatcacttgagactaggagtttgaggctgcagtgagctgtgatcatgtcactgcactccagtgtgggtgacagagggcgaccctgtctctgaaaagtaaatacacagagataagagaacactttgaagcagctatataccaatgaatttgaaaatttagaagaaaacgacaatttcctgggaaaacacaacctaccaaaatcacttttgaggactgcagtacacctacattcattatattgaatcagtagttttacatgcagccaagagactctacaaaacctctgtgattttgcaagaaagtcctaacaaataaaaaacagataatccttgtattgttccagagaataaaaaatgagagaaaactccctgtgctagtctgttttcacactgctataaacaacctctctggccgggcgcggtggctcacgcctgtaatcctagcactttgggaggctgaggcaagcggatcacctgaggtcgggagtttgagaccagcctgaccaacatggagaaaccctgtctgtactaaaaatacaaaattagccagacatggtggtccatgcctgtaatcccagctactcgggaggctgaggcaggagaatcacttgaacccaggaggcggagattgcagtgagccaagatcacgccattgcactccagcctgggcaacagagcaaaattccgtctcaataaaaaaaaaaaagaacttccctgagactggataatttataaaggaaagagatttaactgactcacagttccacatggcttgggatgcctcaggaaacttacaaacatggcagaaggggaagcagacacatcctacatggcagaaggcgagagagagcgtgtgtgaaggaggaactgtcaaacacttagaaaaccatcagatctcctgagaacagcatgggggaagccacagccatgatccaatttcctcctcccctgacacgtggggattacaagtttctcccttcccatgtggggattacaatttgagatgagatttggatggggacacaaagtcaaaccatttcactccccatctcatttgtttttcttttgagactgagtgtcactctgtcacccaggctggagtgcagtggcgtgatcttggctcactgcaacctctgccttctggtgtcaagcaattctcctgctttagtctcccaagtagctgggattacaggcatatgccaccacatctggctaatttttgtatttttagtagagatggggcttcaccatgttggtcaggctggtctccaacttctgggctcatgtaacccacccaccttagcctcccaaagtgctgggattacaggtgtgagccacctcacccagcacccatctcatttagtgaggctagattcatcttagtacaataccagagaggagagaaacaaacaccatggccagtattgcttaggaacacagttcaaaaatactacgtaaagtatcattaagccaaatggaactaaatatggagaacatatattttgtgtgccctctgtggaagtccctgggacagggtggggcagcaacctggcagggagctggtgctcatattgtcagggtgcctgggagatccaatggcccagtagttgaggagatttgctgcacacagggtgacggagaaaatgagtcaatatatggaggatttcagggatccaagtttcttactttcttttttttttttaagagacagagtctcactctgttgcccaggctagagtgtagtggcgcgatctcagctcactgcaagctctgtctcctgagttcacgccattctcctgcctcagcctcctgagttgctgggactacaggtgcccaccaccacgcctggctaatttttttttttttttgtatttttagtaaagacggggtttcaccgtgttagccaggatggtctcgatctcctgacctcgtgatctgcccgccttggcctcccaaagtgctgggattacaggcataagccaccacatccggctcaagtttcttattttcagagaaaaaaaaagtccaattatggaaggaggaaatgctagaatgaatcctggggagctttttggaatgggaagaattaatatgaatgtgtttttccatataaatatataaaacaatcaatgtaaatgtgtacacacacacacccataccccagtagtaatgagcacacttagtagtcagatctttgtttctaaacaccaccttccactaaaagaaaccagacctttgagaggtcaaggcgggataatcccttgaagctagaaatttgagaccagcctgaccaacatggtgaaaccccgtctctaccaaaaatacaaaaaaattagctgggcaaggtggcgggcgcctgtaatctcagctactcaggaggctgaggcaggagaattgcttgaacccgggaggtggaggttgcagtgagccgagatcgcaccactgcactccagcctgggcaacagaacaagactctgtctcaaaaaaaaaaaaaagaaaaaagccactaggttttgggtaatttgtttacacaatagataactaatgtgcgtggaaatacaagtgaccaaggaattgcttattgctttttgtatgatcttcatctctcccactgctcattccgcatcatcccccgactttggccatctgcaccccagttgccctcaaccaaagtcaagctccactctctaagctgggcttgtactgtcggggttcccttgctgacggctctcctcatgagactctgattttccccaagacagaccttccccctccttttcctttatatgttgagcagcagggtccctagtgttgggcaaagaccctggcagacggtgggcggttaggaattgtcagtgggaggagttatacccagtcataattgaggacccagtgatggttggatttatgatgactgccaggcaccgtgctgagttctgcaaaccctaaattctagaccaggggttctcaaagtgcactccccacccgagcagcatcagtatcccaaaattcctgggcctcaccccagacccactgaatcagaaactctaagggttgatcctagcaatccatggcttaacaatttctctgggtggttctggtccacatttacatttgagagccaccgttttggagtttgagaagacaatgaattagggcaaatgggtcaattcccagcagagagaagcaagaatcttttctgaggcccacactgaattccagctctttcctgggctgatgttaccattgtccttcatggggtgggtccacatttccagtcgcccacctggggagctggtgcagcagagaatgtgcttaaggctcaaatcccagcttttttcctgttttaaatctcggctttatttacttttatttctccaagtgggacttcatgtgacttatgggggagctattttgtttgtttgtttgtttgtttgttttttgagacggagtctcgctctgtcgcccaggctggagtgcagtggtgcaatctcggttcactgcaagctccgcctcctgggttcatgccattctcctgcctcagcctcccgagtagctgggactacaggcgcctgcaccacacctggctaatttttttgtatttttagtagagacagggtttcaccgtgttagccaggatggtctcgatctcctgacctggtgatccgcctgcgttggcctcccaaagtgctgggattacaggcgtgagccacggcgcccggcctgaataagtaaatttaaaaaaaaagaaaaaaaaaagaggccgggcgcggcggctcacgcctgtaatcccagcactttgggaggcgtaggcaagtggatcacgaggtcaggaattcaagatccgcctggccaagatggtgaaaccccgtctctactaaaaatacaaaaaattagccaggcgtcgtcatgggctcctgtaatcccagctactagggaggctcaggcagagaactgcttgaacccgggagctggaggttgcagtcagccgagatcgcgccactgcactccagcctggcgacagagggagagactctgtctcaaaaaaaaaaaaaaaaaaagagccaggtgttggtggctcaggcctgtaatcccagcacttgggaggccgaggtgggtggatcacctgatgtcagaagttcaagaccaacctggtcaacatggtaaaactctgtctctactaataatacaaaaattagctgggcatagtagtgaacacctgtaatcccagttacttgggaggctgaggcaggagaatcacttggacccaggaggtggaggtcacaatgagccgagatcactccattgcactccagcctgggtgacagagagagactctgcctcaaaaaattaaataaataaataaatatcttatctagaggcagggctctgtgtgtgtgtgtgtgtgtgtgtgtgtgtgtgtgtgagaaggaggaagggacataggccaggcacgatggcttacgcctgtaatcccagcactttgggagtccaaggcagacggatcacctgaggtcaggagttcaagatcagcctggccaacatggtgaaaccctgtctccactaaaaaattagctgagtgtggtagcatgtgcctgtaatcgcagctactcgggaggctgggcaggagaatcacttgaacctgggaagcagaggttgcagtgtgtgagatggggccattgcactccagcctgggcgacagagcaaggctctgtctgaaaaaaaaaaaaaaaaaaaaaaaaaaaaaaggagtggggggcgggggacagagagaggcaggctactttatagaattccctttctctgtcaggtgtttggagctcatttttcattttattttatttacttatttatttatttttgagatggagtcttgctcttgttgctcaggctggagtacaatgatgcgatctcagctcactggaacttccacctcctgggttcaagtgattctcctgctccagcctctggagtggctgggattacagacgtgcgccgccacccccggctaattgttttgtatttttggtagagatggggtttcaccatgttggccaggctggtctcaaactcctgacatcaggtgattcacccacctcagcctcccaaagtgctgggattacaggtgtgagccactgtgcccaggctgttttttattttattttattattattgtttttttgagaaggagttttgttcctgtggcatgatctcagctcactgcaatctccgcctcccgggttcaagtgattctcttgcctcagcctactgagtaactgggattacaggcatgtgccaccacgcctagctaattgtttgtatttttagtagagatggggtttcatcttgttggccaggctggccttgaactcctcacctcaggtgatccgcctcggcctcccaaagtgcagggattacaggtgtgagccactgcgcccggctggtctttagagcttattttcaagcccatcacaaagtccactcctcctcaccaccccatgaactttctcgttgttcttgctgctatctagagtgccattcctgtctttctccttctcctagaagttttatgcaatccatagaacaatgcagaagtgacggggggttgggggaggattaggaggaggaggaggaggaggaggaagggagaatgaactgctcccagttctctggcatgtatcctgccccttgcttcatgctcatgaaaaacattttatagcatatttacagctgcttagatgtaggtgcaatgtatccatggaaataatccttgcaggatatacaatttattgtgtaagttaaggaataaaatgtcagaaggatgaattatgtgcccagtgacatatagcaacggcatggctgagattagcctggttatcccaatcactcctgctctttcccaaaaaaatgagtgaggaatgtgccccagctcctccatgtctaacctccgtgctgagatgtgctgagcacctactatgtgccaggcaccgcactgagctctttatacaattagatctcattgtttcaccaccacattgcaaggcagttactgtatcatcctgattctataaatggaaacagtaaagctcagagagatactttaataactcaaccattgttacccagcctgggtgtggcagggaagcgatctgaacccaggtaacctagcttcgagactgtgggcttcaccactgctttctattggcaaccttcagatagtttctttctcttgaatatttagtatattcgtttctattgctgcttcaacaaataagcacaaacaacacagatttattctcttacatttctagaaggcagaggtttaaaatggattggtgggaccgggcgcctgtaatcccagcactttgggaggctgaggcgggcggatcacgaggtcaggagatggagaccatcctggccaacatggtgaaacccagtctctactaaaataaaaaacttagctgggcatgatggcacgcgcctgtagtcccagctacttgggaggctgaggcaggggaattgcttgaacctgggaggcggaggttacagtgagctgagatcatgccactgcactccagcctagcaacagagcaagactccatctcaaaagaaaaaaaaaaaggattggtgggactatattccttctggggtgttagagcaggatccatttccttgccatttccagcttttttttttgtatttttagtagagacggggttttaccttgttagccaggatggtctggatctcctgacctcgtgatccgcccgcctcagcctcccaaagtgctgggattacaggcgtgagccaccatgcccggccccatttccagcttttaaaagccgcctgcattccttggctcctggtggtcacctccatctttccagacatcactccagcctctgcttccatcttcagctctcctcctctgactcagatcctcctgcctctcccttctggaaggcgccctgtgattaccttgggcctgcccagataatctgggataatctttctatctcaagatccttaatttactcctatctgtaagatcccttcgccatgttaggtaatatatccataggttgcagggatttggatgtggacagcttttgggggctattattggttctaccacatttggctgtttctattttgtagactaataacaaaaaacatttttgaatgccttcatagactttaattccattagcttaattccacctgaaaaacctgttgatcgagcaaaactaggttatttggacttcctgcagtaaaggagaacaccgtcaacagattcaaattagggaaattagggaatggtatttatgggtttttagggccctggctgggtgatgttaaagcaagtcttgcaaggcaggaaactggttgcgattggggagtttctgacataagagctttggaatggtgggcccaggaagacagggttttgaactcacatctgatgcataatcttatcttccagagcaggtatttttttggagcaagaagtgaagtgacttttgcctgtcttgatattgcttaacccaaggattatgttggttttagcccttgctaattacaataatagtatttttttgagactgagtctcactctgtcaccacgctggagtgcagtggtgcgatctcggctcactgtaacctccgactccctggttccagtgattctcctgcctcagcctcccaagtagctaggattacaggcacatgccaccatgcccagctaattttttgtatttttagtagagatggggtttcaccatgttggacaggatggtctcgatctcctgaccttgtgatgcacctgctttggcctaccaaaatgctgggattacaagcgtgagccaccatgccaggccataatttccattttttagagcacctcctacaggccaggcaattttgaatacattttgacaattacaacaaccctacaaggcaggtatttcaacttaatctcagtatggcgcaataactcccctcttggattttggagtcaaaaagtcttggataaaaatccgggctcctccacctacctgccaggtgaataggcaggtaagttctctgggtgagtctccatgtcttcatctgtaaaatcaggataatgcttcccacttcgagtgtgtaggagtgtgcacactgtgtgcccacatgagtaaggggaccatgcttccctgtcattgtttttgttttgttttgctttaagacagagtcttgctctatcgccagactggagtgcagtggcgcaatctcagctcactgcaacctctgcctctcaggttcaagcgattctcctgccttagcctgtctagtggctgggattacaggtgcatgccaccaggcccagttaattttttatttttattttttttgagacagagtttcgcgctgttgccaggttggagtgcagtggtgcgaacttggctcactgcaacctcggcctcccgagttcaagtgattctcctgcctcagcctcccgagtagttgggactacaggcacacgccatcacgcccagctaatttttgtatttttagtagagatggggtttcaccatgttggccaggatggtctcgagctcttgacctcatgatctgcctgcctcagcctcctaaagtgctgagattacaggcatgagcgactgcacgaggccatttttttttttttttgtatctttactagagacggggtttcaccatgttggccaggctggtcttgaactcctgggctcaagtgatccacctgcctcagcctcccaaattgctgggattacaggtgtgaaccagtgcacctggccccctgtcattgttatcattgttagtagtgtccttttttattttttatttttttgaggcagaatcttgctctgttgcttaggctggagtacagtggtgcaatctcggtttactgcaaactccgccgcccagggttcaagcgattctcccgcctcagcctcccgagtagctaggataacagacgcatgccaccacacccggctaatttttgtatttttagtagagacagggtttcagcatcttggccaggctggtcttgaactcttgacctcgtgatccaacccccttggcctcccaaagtgctgggattacaggcgggaaccaccacgtccgaccatgtccttttattattccccaaagagtccttccttagatgatgaattatatgggcacagttccaatatggtgacactatgcttattacttttactcagtaggtgaaaggggatggatcagtgagcttaggtgacatgcttagggctgcacggctaattgggaagaattctccaagctaaagctgcatagcagaccaggtgctatccttctgcctggaacaactcaacacaatgccagactttgtaactatgtatttgtgtgatttgtttcgattttgatgtttttaattgagacagaatcttgctctgttgcccaggctggagtgcagtgattggttcactgcagcctcaacttcctaggctcaagcaatcctactcctcaagcctcccaagtaattggaactacaggcatgcatcaccatgcccagctaatgtttgtattttttgtagagacagggttttaccatgttgcttaggctggtctcaactcctggcctcaagcaatccacccacctcagcgtcccaaagtgctgtgatcacagggcaaagccactgtgcccggcccatttatgttatttttaaatgaaacctgtcttccaccaggctcagtggctcacgcctgcaatctcagcactttgggaggctgaggtggtcaggagttcaagaccagcttggccaacatgttgaaaccccatctctactaaaaatacaaaaattagctgggcgtggtggcgtgcacctgtagtcccagctactcaggaggttgaggcaggagaattgcttgaacccgggaggcagaagttgcagtgagccatcacgccactgcactccagcctggtgacagagctagactctgtctcaaaaaaaaaaaaaaaaaaattggtgaggaagagatcattcatcattgtcactgtatttgataaacatccatctcccacagctgggcagacataagagcggggagaaattctggccatgcactgggcgctctcaggtatggtttatatgcctggctagggcctggctccaaatgtcccccagcaaacaggtttgttttttttttttgtaattaccatactttgggcttggccctcacaagattatctcccttgaattagataggatttttttggacacgatgaaaaaccgtgcctcctcttaacagttactatattataatgctatgccttggtctttactgcgggggtctcctagttccaggaggatattaacccacacatatttgtgtatttagatgaaggtaatatatggtcctggtattaaaacttcaatcactatagaagagtttttaacaagatttaaaatatgtgcagaccccatgactcagcagtttgaactccaggaacctcatctttaaaaacatgcaaccagcaggtgtgcagaggatacttcttttatctctctttgtaaaagcaggaaaaactggaataacctaagggtctattgaggagagaggggttgctgacttacacatcagggtctatccatacaatggaatgcctctcaggtgtcaaaaataaggaggctgagctgaagatggtatcaaggatttggcattagagaacaaagcaaacattaacattatgtatgcttgcacagagatagatactcatataactgcctagacaagggcctaaaaatgcaaagtacttaaatctgttacctctttggcattttaaaaagattgtatttagataatattgaggtcattttagaagacacacacttactgcattaaaacaagcaaaagttgaacaaaaaggtaataacgttaagcaggttacaattccattgtaagtaaatggtggtgttaatagttcaagtgcttccttggtcactttaagattgtttttccagagctgggcagcaggagaaataagttaaaatttcattccgacatccccctgccaaaaaatagcctgaaaattcagcctcagctctggtctgaatccggtgacaggactgactaccaggagatctctcagcctctgcgctgctgactttggggtctgagtcattcttggttctgggaggctgccctgtgcattgcacggtatacagaagcttccttggcctctacccattcgatacctgtatcaccccctcccagttctgacgaccaaaaatgtcttcagacccagatatcccctgaagtgcaaattgcccatcccatccccacctgtggttgagaatcactggagtaggatgatggacgtcagggtttcctgggatccacctggttggtgtctcatgaactgaggaaattactaactgcgccccctttccttctgtaataaaccacatggtcactctggctccggccctttttccctagaaaaatgtacccatgcttgtggcatcataatccccatgtctgtcattctcgtcaacacttctcatggtttttgtcacgcgcgtccgtgtgaagagaccaccaaacacgctttgtgtgagcaataaaactttttaatcacctgggtgcaggcgggctgagtcttgtatatgtgcaggtcacacaggggataagatgacttagcttgggctcagaggcctgacagttttggtcgtagccatcttcgtggatgcatgatatacccttttgaaacttcttccagaactttttttctttttcttttttttttggagacggactcttgctcggtcaaccaggctagagtgcagtggcatagtcttggctcactgcaacctccgcctcctgcgttcaaacgattctcctgcctcagcctcccgagtagctgggacggctgacacacaccaccacgcccagctaattttcgtagattttgtagagacagggtttcaccatgttgcccaggcttgtctggaacttctgggatcaagcaatcctcccaccttggcctcccgaagtgctgggattacaggtgagagcaactgcgcccggccttcttgtcttagatttgttttactcaaagccctgtggcttacctttatatgaagttccaaagaaggacattttaacactcctgtacttaaatcactacagaagcatgtttgggtgaggaaactctatgaacttggtttctaaagaaggccttccagccacgggcacgctacacaatgtggggccatttattttgcaaatcagtaagacttcaaaatttaaaaaataatagtataaaaatgaggatggaccgggcgtgatggctcatgcctgtaatcccagtactttgggaggctgaggtgggtggatcacccgaggtcaggacttcgagaccagcctggccatcatggtgaaaccctgtttctattaaaaatacaaaaagagcttgaacctgggaggcagaggttgcagtgagtggagatcgtgccactgcactccaacctgggcgacagagtgagtctccgtctcaaaaaaataaaaaataaaagaaaatttaaaaataaaaaataagttaaaatttggatgaattgctgggggaatggagaaatcaatttctatttttggtccttctgccctgtttttgtttgtcttctgggccatgcagatgtcttgtttttataattaaaaaactaggcggggtgcagtggctcacatctggaatcccagcacttagggaggctgaggcaggaggattccttgagcacaggaattcaagaccagcctgggcaacatagccagatcccatctctacaaaaaattttaaaagttagccaggtatggtaatgcacacctatggtcccagctactggggaggctgaggcaggaggattgcttgagtctgggagatcgaggctgcagtgagctacgataccagcatggccctttagcctgggtgacaaagagagaccctgtctcaaaacaaaaacaaaacaaagtattttattatacgtaagtccaaacacattagcacaggccctgaagaacagcagaaattgcacctaaatctccttctccccatgtacatatccaaccccaccccttgttcccatttgtgctcagctggggtcaaggtctcaccatcagagctggcttccgaaagggctcctttccctacaggtttcccccactggactttacctccagatgcccaggacatgggacatcatgcaaagacctagcacgtggtgagcatttagaaaatatttacagaattattcacagtatttgttgagcacctactgcttattcatatcagttatgatctgctgtgcactgctgagcactggcagaaagagaagaccctgagcatcttaaattcacggcagttgccagctggagttcccatctgaatttcctggaggaaggcagaccccatcgcgactttctttctttcttttttttttctccttgaggctgagtctcgctctgtcgcccaggctggagtgcagtggtgctatctcagctcactgcaactgccacctcccaggttcaagcaattctcctgcctcagcctccagagtagctgggactacaggcgtgtgccaccacgcctggctaatttttgtatttttagtagagacggggtttcgctatgttggccaggctggtctcgaactcctgacctcaggtgattcaccagccccagcctcccaaagtggtgggattacagccataagccactgcgcctggcctcttcatttttttgagaccaagtctttctgttgcccaggctggagtgcagtggcacgatcttggctcactgcagcctccaccttctgagttcaagcgattctcctgcattggcctcctgagtagctgggactacagatgcctgtcaccacgcccagctaatttttgtatttttagtagaaacgaggtttcgccatgttggccaggctggtcttaaactcctgacctcaagtgatccaccggcctcggcctcctaaagtgctgagattacaggcatgagccactgtgcccatcccccaccgggactttctaattcaggaattctagagtgggaccctgtaatttgcatttctttttaaaattattttttgttcttttcttccccgcccaccccaccccgcgccccccacccacccagcttttcctgactggagaagaacggggacagaaggcctgatttgcatttctactatttcccaggagatgttgacgttgcaacaaagagaaccactcaaagagaatagctctgtgagaaccaatgttctagagtttaggaagaccatcaattggggtaaatgagccaattcccaggagaaaaggggaaggaccttttctgaggcatgatctgaatttccagggctgatgttgccctttgttatttccacaggggatctgcgttttcaatcgctcacctgcagagccgccagattctggccaatctcggcttttttccctctcactgtgggttcttcagagccccatggtttagacacaacggtggattctcttgtgccccaattaccacatgcgtcatggggagaagagcttgaaccccccagagggtcaggtccaggtgagaattgagggtgacactgagagaatttagctaggtgggcgctgtgtaccgcatcattgcctgctcctttcgcagttttgcatttgtgtgttgtacagctacgtgtctcaacctagaaggatctccaggatgtatccttgggtggaaaaatttaggtactagaatctaggccgggcgcggtagctcacgcctgtaatcccagcactttgagaggctgaggtgagtggatcatgaggtcaggagatcgagaccatcctggctaacacggtgaaaccccatctgtactaaaaatacgaaaattagctgggcacagtggcatgcactcgtagtcctagctactcgggaggctgagccaggagaatcgcttgtacccgggaggcggaggttgcagtgagccgagattgcgccattgcactccagcctgggcgacagagactcctccatctcaaaaaaaaaaaaaaaaaattagccgggtgtggtggtgggcgcctgtaatcccagctgctactcgggaggctgaggcaggagaatcgcttgaacccaggaggtggaggttgcagtaagccaggattgcaccactgctctccagcctggatgacagagcaagactgtctcaaaaaaataaataaataaataaataaataaatataaaaattaaaaaaattttaaaaaagaaatctatattgagttttgtacctacctatgattcatggatacctaccagggaaaaagcagaataaaaacatgcacagaaggaaatattccaaattgtgcttgcctgggtggtaacttgctataatgttttacttctgtaatgggagggagtacacacgtggctattctattattcctcccatgttttcctatctgaaatatttcatattttaaatgtttatgtaataaattttgtcaacctctttcttcaagtcttggtgttaaaatcatgtgtattactaaatcttttttttttttttaaatttaagaggcaggatctcaccctgtcacccaggctagagtacagtggtgtgatcatagctcagtgcagcttcaaccttttggactcaaataattctcccacctctgccttcccagtagctgggagtacacgtgtgagccatcatggctggctaattatttttatttcttgtagagataggatctcaccacgttgcccaggctgctctcaaactcctgagctcaagcaatcctcctgccttggccacccaaagcgctgcgattacaggcatgagccactgcacctggccttaaacactttttcttcctaatatatttttacaccttcagctgtttgctatatctaacggccagccctccatatccatggggtcctcattcatggattcaagcaactgcaggtggaaattattagaaataaaaaaggatggttgtgtttgtactgaacatggacagtttttgttattattctctaaacaatacagtataacaactatttacatagcatttacattgtattaggtattaaagctaaagactgcacagcaggtcctcaaataactttttttttttttgatggagtctttttttttgatggagtcttgctctgtcacccaagctggagtgcagtggtgtgatcttggctcactgcaacctccgcctgctgggttcaagcgattctcctgcctcagcctcccaagtagttgggattacaggtgtccaccatcatgcccagctaattattgtatttttattagtgacgggatttcaccatgttggccaggctggtctggaactcctgacctcaggtgatccgcccgcctcagcctcttaaagtgctgggattgcaggcatgagccactgtgcctggccaacattctttcatttaacattgtttcattatatcattgatgagaaaacaaattggttttgtttatacatcctttccctttaagtcaaagtttctaagaatcttaactgtatacagaaggatgtatggttggttacatgcaaattctccatcattttatgcaagggacttgagcatccatggattttggtgcctgaggagagtcctggaaccaatcccccatggatactgagggacaactgtaatcttttttggaataaggaattaaaaatttccccaaaatgcttctccttaatgtcatttattgaataacttgttatttctccactgatgggaaataataccttttaccatttaccaaacccccatatatatgtggatggaattctaaacaccttattctattttattaagttttctgattaccctataccagtaccagatcacttaattaaaattggtattattatcaagaggacacgtgcttctggtaaatgatgttgagacaacacctagagagtttaatttcccacctctcctaaccgcacttcccagagacaaagctctgggttagggttcgcagcaggattaaggagcaagagcccagctggggtgctggggagcatgcagggccttaggaccagcgaagggaggttgcaattatttccccagggttctgggtggtccctgttcattagctagaaatgatgcacctttggggctagcaatgcgctgtggttgttagtactttattgatgaaaaaaatgaggtcatgagtggctgtctaatccaaaatcatactgctagggagtaggtgaaattcctcaagttaaagttgcatagcaagacacatgctgtttcttttatttggaatatcttccctcctccatcactctttcacatgttgtagcacatatatgtgtatatatatggtgtgtgtatatatatagtataaatatatgtatttattttatatattatatatacacatatattatatatatgtatgtgtatatatataatatatatcacatatattttatatatatgtatgtgtgtatatatatatgtatgtgatatatatatatatatgtatgtgatatatatatatatatgtatgtgatatatatatatatgtttgagtcagggtctcactttgtcacctaggctggagtgcagtggcacaatcacggctcactgcagcctcaacctcctgggctcaagtgatcctccccactcagccttctgagtagccacgactaaggcatgcaataccacatagatatttgattgctgtgtccccagtagaccagaaactccaaagtgttgggcactaggtctattttgttcactgctctatgcgcagtgcctgtaattgtgagagtgtatggtaggtgctcaatggatgtttgtggatttacaggaaaacccttatcctggtgcctaggaaagggttaagacatactaataatttcgggcctagtggctcatgcctgtaatcccagcactttgggaggctgaggtgggtggatcacctgagatcaggagtttgagaccagcctggccaacatggcaaaaccccgtctctactaaaaatacaaaaagtagctgggcgtggtggtgggtgcctgtaatcctagctactcaggaggctgaggcaggagaattgcatgaacctgggaggcggaggttgcagtgagccgagattgcgccattgcactccagcctgggtgacaagagtgaagctcagtttcaaaaggggggaaaaaaaaaaaggctgggtgcagtggctcacgcctgtaatctcagcactttgggaggccgaggcaggcggatcacctgaggtcaggagtttgagaccagcctggccaacatggtaaaaccccaactctactaaaaatacaaaaattacccgggcatggtggcacgcacctataatcccagctactccagctgaggcaggagaattgcttgaacctgggaggtggaggttgcagtgagccgagattgcaccattgcactccagcccgggcgacagagcaagactccatctcaaaaaaaaagaaaaagaaaaaaagaaaaaaagacatgcgaataattatgtgccagagggcttttgatcacagacaggctcagtctccaaatgtctagtacagaatcctctaaagatgttcgcaagtccagcgacatggtgtgcattccagtaacagaaaagcctctgcttccatcaattatctgtgtaggtgctgtgaccccgtgcctgagtaacccagagtctgtgagtaacagagcagtcctcattttggttgcttttatttaaacattggtaccaagccacctttcaataagttagacccggccagtgtggtggttcatgcctgtaatcccagaattttgggaggctgaggcgggcagatcatgaggtcaggagctcaagaccaacctggccaatatggtgaaactccatctttactaaaaatacaaaaaaattagccgagcatgagggcacgcgcctgtagtcccagctactcgggaggctgaggcaggagaatcacttgaacccgggaggcggaggttgcagtgagcgagattgtgccactgcgctccagcctgggtgacaggaggctccgtgtctaaagataaaaataaaaataaaaatgtaaataagctagacccaggaagcagaaatcatgcccatgccctgggttgtcttggttatggtttatgtgccagtgcttttgttacctgtctcctggatgggctattcaggcttacaagactttcccttaatcaccacacctggggagtgggggtgtctcatagatttgctgccacctgataaaatgaaaattctaaattctcctggaatattttcttgtttactagaataacatatcctacaaatcttggtctcctaccacaggagaaaattattgtttttatgtatcaactaacttacattccttaaggtggacttttccccagatgttaaaaaatgcatgctgggcgtggtggctcaagcctgtaattccagatacttgggggactgaggtgggaggatcttttgagcctagtagttggaggctgcagtgaactatgatggtgccactgtactccagcctgggaaacagagcaagaccttttctgtatttacaaaaaaaagagaaaagaccgggcatggtggcttatgcctgaaatcccagcactttgggaggctgaggtgggaggatagcttgagcccaggagttcaagactggcctgggcaacatagagagaccccgactctgcaaaatataaaaattagggccccaatgtctacgcacaccggaagacagaggtcctctttccttgcctaatgcagccatggctcgtggtcccaagaagcatctgaagcaggtagcagctccaaagcattggatgctgaataaattgactggtgtgtttgctcctcatccatccaccagtccccacaatttgagagagtgtctccccctcatcattttcctaaggaacagacttaagtatgtcctcactggaaatgaagtaaagaagatttgcatgcagcggttcattaagatcaatggcaaggtccgtactgatataacctactctgctggattcatggatgtcaacagcattgacaagtcgggagagaatttccgtctgatctatgacaccaagggtcgctttgctgtacatcgtattacacctgaggaggccaagtacaagtttgtgcaaactgagaaaaatctttgtgggcacaaaaggaatccttcaaatatatatatatgtgtgtgtgtgtgtatatatgtatatatatttatatatatgtgtgtatacatatgcatatatatttatgtgtgtatatatgtatatatatttatatatatgtatgtgtgtatatatatttttttcccaaaggaaaaagaagacgtgagccaccgtgcccagcctccacaattgtattatacatatatcaaaacatgttgtacactgtaaatatacataacttttatttgtcagtttcagcttaacaaaactagaggaaaaggctagtagagaacaaaacgagatacgggcatagataataatgcagaagaatggacaagtatattgccaggtggtagatttatataaaattgcaaagaataagatcctcgttataaaagctgtatgtgaggccaggcgtggtggctcacgcctgtaatcccagcactttgggaggccgaggtgggtggatcacctgaggtcaggagttcaagaccagcctggccaatatggtgaaccctcatctctactacaaaatacaaaaattagccggatgtggtggcgggcacctgtaatctcagctactagagggggctgaggcaggagaatcacttgaactcgggaagtggaggttgcagtgagccgagatgatgccaccgcactccagccagggtgacagagcgagactctacctcaaaaaaaaaaaagctgcatgcagatatatgtacttaaatatatagaaaagggactcacaggatatttaccatgtttccttctggggagaagcgaggcaattcctacttgttggtatgggaagagcacctaccagggcagagtctgagagaaatatcctattaacctcaggaataatgttcaattctgggaaaaagccaggaagatggacatttatgtgttccatggcaatacacgtatacatattttaagagtattttataaccaaaatgtacgtatgccttcctggattttaaaaatacattaataccaaaagctaacaaagttatcaagtggaaaaaaatgcaagtctctgtctttacccacccaccactcacctgccttccccacttccaggcagccaccataaacaatgttcccttagatgtggaattgttcctttgtaagtaaatattgttgttaagagaaaatgctaatagcaagggttttctgcagcgaattttgatggctatgcattgggtgtggtcacgggaggagaaagaaattaaaccatccctccaatggagggggaaaaaaggaaagaaaggaagaaaggaaagagaagacgatgacccacaaaatgagtacctctgagtctgatccgaaacccttctacacatagtgtacaggcacaacagttgaccaccaggccttaattattattattattattttttttttttttaaagcagagtttcgcccttgttacccaggctggagtacaatggcacaatagcggctcaccgcaacctctgcctcccagattcaagcgattctcctgcctcagcctcccgagtagctgggattacaagcatgtgccaccacgcccggctaattttgtatttctagtagagacatggtttctccatgtaggccaggctggtctcgaactcccgacctcaagtgatctgcccgcctcggcctcccaaagtgctgggattacaggaatgagccactgcacccggccaatttttattattttaaaattgtatgtaaagatggagactcactatgttgcccaggttgaactcctgggttcaagcattcttcctgcctgcctaggcctcccaagtgctgggattacaagtgggagctactgcacccaaccctgccctttaaataatattgatgttaattagaataagagcagcagctattgtgcttgatcctgtttctttttctttctttttcttcttcttctttttttttttttttttttgagacagagtctccctctattgtccaggttggagtgcagtggcacgatctctgctcactgcaacctccgcctcctgggttcaagttattctcctgcctcaacctctggattagctgggattacagacgtgcctcatgcccggctaatttttgtatttttagtggagacggggtttcaccatgtttgccaggctggtgttgaacccctgacctcaagtgatccacctgcctgggcctcccaaagtgctgagattacaggtgtaagccaccatgcctggccctttttcttttttataaattgagacagggtctcgctttgtcacccaggctggagtgcagtggcacaaactctgcttgctacagcctcaacctcctgggtttgagcaatcctcctgcctcagcctctcgtgtagctgggaccacaggcacatgccaccatggctggttaatttttaaatttcctgtaaagacggggtcttgtagagaacagcctaggctggtctggaactcttgggctcaatcaatcctcctgcctcagcctctcaaagcgcttggattacagacgtaagccactgtgcctggcctacccatgggggtcccaactgccacattttctgccgcttgggttcacccatccctctcctccacccgtccctcctttctcagtattgtaaaacacaccccgacctcatatcattttacccagaaatatatcagtgtccatctaagcagataaaggcgttcttgcttgtttgtttttctaacgcccagtgtgatcgtcactcccagtacacgttaataaaaatttctgggctgggtgcagtggcttgtgcctgtaatcttagcactttgggaggccaagacaggggaatggcttgaggcaaggaatttgagaccagcctggacaacagagtgagacccccatctccacacacacacacacacacacacacacacacacaaattagcgcggcgtggtggtggaaggctgtggtctcagttacttgggaggctgaggtgggaggattgcttgagcccaggaggttgaggctgcagtgagccatgattgtgccactgcactccagcctgagtgacagagtgagaccctatctcaaaataaataaataagccaggcacttattaattctgtgactcccatctgtaatcatagcacttggggaggctgagacaggaaaattgctcaaacctgagagggggaggttgcagtgagcagagatcatgccactgcactccagcccgggcaacagagtgagtgagacttcatctcaaaaaataataataataaatgaataataatttcttaccatctaacaacaggtccccttttcaattctgtgcttttaaatgagaccagaggaagagctggaaagctttggaaacttgccaaacattgtaaagcacttaaatgaatgtcttcaagggctgtgctcaaagtgtgatccccaggcagggccaccaaaccaccctggagcttgctagaaatgcaaaatcccaggcccagggccccagatccagtggaactgaactaccgctggaccaaaaccaatggatcattaaagtttaaggttggctatctccactgtgtggaaggcagtggctggtcctctctgaattaatctactttttcttgaggcctggatcttgctggttgatagcagcttcactgagtcttcccaccagcagtgagagcctgccatgtgttaaacatcaaccaggcctatggggacagttgaggtcactgccgttgacaggctcctattctagtgcaagatacagacaagaagctaataaatgataaagaaatagagtaatcccaggttgtgattattaacatatgagttgtgcgaggcctccccaacaagcctattgaaattgcaccagcagagccaggtgcggtggctcacacccgtaatccctgcacttcaggaggctgaggtgggcggatcacctaaggtcaggagttggagaacagctggccaacatggtgaaactccgtctctactaaaagtacaaatattagctgggaatagtagcacctgcctgtaatctcagctactagggagactgaggcatgagaatcttttgaacctgggaggtggaggttgcagtgagccgagatcgcaccactgcactctagcctggttgacagagcaagcaagactcagtctcaaaaaaaaaaagaaaagaaaagaaaaagaaatggttccagcgcctaaggtgtcctccccctctggctttactttgccctgtggccctgtttccagatgctgggccatgcatcttactacttatttgctcattgcttttctcccaggccaggaagtaatcatcacacacagactgccatatacccacccttaggacacagaaggagtaggagaaatacttgttgaatgaaagctactatgacttttcaaacaatgagagtgcctaaaagtgatcaatacctgattagcgattgttttttaatacatctgattcctacccatgggaagagttcctatgtggaatgaggctacaattctttcactgaaaataaattgcaccctatcctgggtgctgctccaacctcacctcagggctgggagcctggtgctgccacacccttgccctgagcagaagaatccggaagaagcctttggccagagccgcaggtgagtcatttgaggactctatgcccttgtggccatccttcggtcacctgtctggaattttattttttttagcccccgggctctgcaccaaagagctggctttttttgttgttgttccagctatacctaaaagggaccagcctcattcatataaagatctcagatctctcaaaaggcatctacaaattaagagtaattctgctcaaaattaaaggaaaaacatttttttggcggaggagggaattgtgtagagttgaagaaatccaagagattgtaaagttcttgtggagggtggagtcagtgagaggaggcagagaaacaaggcgaaggcctttgcgctccatctggtatctgtgtccaatagatggtttcacccacagcatggcagagtccagcaaggatccaagaatatgcaggaatcagggaaatgatgaagacagcactttaaatgggagggatttttaagtaaatgctattaggccaatcaactggaagtctattcatttgcaaacagtaacatgaggcttcctcctcaaaccccaaacacatatacacgcacattccacagttccacacgggctcaagacccaaaccaaaaaaacaaattctatgagaatgcttgatacaagactaataaaaagaagactgggccaggtgcggtggtggctcatgcccataataccaacaccttgggaggcctaggcaggaggatcacttaaggccaggagtttgagaccagcctgggcagcacggtgagacccccgtcactacaaaaaatacaaaaattagctgggtgtgctcgcatgctcctgtggtcccagctactcaccgggctgaggtgggaggatcgcttgagcccaggaaatggaggctgcagtgagccccgattgagtgattgaacctgggtgacagagcatgaccccgtctcaaaaaagaaaaaaaaaaagaaactacactttcagggataatttctatagttggttactagagaagtttctttaaatatgtagagcaccatttaaacagaataataaaaaggctgtgagcagtggctcatgcctgtaatcccagcactttgggaggccgaggtgggcaaatcgcttgaggccaggagttcgagaccagcctggccaacatggcaaaaccccatctctatgaaaaatccaaaaattaagccgggtgtggtagctcatgcctgtaatctcagcactttgggaggccaaggcagacagatcacctgaggttgggagttcaagaccagcctggccaaaatggtgaaacctcgtctctactaaaaatacaaaaattagccaggtgtggtggtgcatgtctgtaatcacagctactcaggaggctgaggcaggagaattgcttgaacctgggacgcggaggttgcagtgagctgagattgtgccactgcactccagcctgggtgacagagcaagactctgtctcaaaaaaaaaaaaaaaaaaaaagagaaagaaaaatacaaaaattagccggacttggtggtccacacctgtaatctcagctgctcggaggctgaagcgggagaatcacttggaccagaccctggagacagaggttgcagcgagcagagattgcatcactgcactctagcctgggcaacagagtgagactccattttaaaataataagaagaagaagaagaagaaaaagagaaagaacactaaaaagatagtgcaatggtaacatgagcaaagagcttaaacaggtagttcactgaagaaggaatacaagtaaatacagtaaataccagaagagttgtcatcaccataccatttctaccatcagggcgcacagatactaaaatgacaaacaaacagaaaatgagacatagctggagataccgtcgaagaagggccaagaatgttgcttggcaaattcatgtaaaagagcagtaagatcttctttaaaaaagctgtgtgcagaaatatgtacttaaatacagtatatagaaaaaggactcaatggctacagacttcttaatcctggttatttctgtggagaagctagggagttcctacttgttatagtgtaccaagtggaacatccattgcaggtgaacttaccaggacacaggctctcttcttcgctgtcggcaggggtctaattcaattgatgggagcatttgagaacctaaatgtagcattagctaaaaactcttggacactacaccctcccttcttgcatttaccctatagcatgtacctgtatgattctgtaagtcctatagatactatgggggatggatccattacattctgtagcattgaacttcccaaatgctcacagcccttaggtcctaaacagcctgtggggtggcttttgcttgggccacaggctatattaaaatatattgcaatcaagcaggggaatagtttaatcttaaagcaagtggtttagcacctggtgtgagaatctcgcttgagccgcctgcctggccctaaaggggacatctctaaacatctgcctctggggttctgaagtgtgcagtggggagtcaccttcacagagaggacttgctgtgacctgtaagacaccatgcctcttctctttccttccgagtgctgcctgacagtgtcctaagtatttgtttgtggtggtttatcctccccaatcatggtaagctttgtgagatcaggggctttgttgcttttgttccccggggtccccaagccaggcctggcatctgggaggtgctcagagtgtatctgttacaggaacaagaaagtcttatccaccgcccatgcagcttaagtaaagcattgtatttactaaacactcgctgtggtccaaatgctttgttgagcaaggtagataagaggatggatgtttgtggactgaaagaaccagctcctgaccccacccttagtgctccaattctggctgagctctgggtgccccagggccttgctatcccttcccctccccctgcttcctctaagaatcttctccatccttcaagaccctcaggattgctgcgaagctctctcacccctggactggaccagaccacccgtagcctcccatagcaccctcctgtatcacctctgtaaatgctgggctggttatggaactgtccaccaagtgcgaaggtttatctcccactgctgatgggaagccccctgaagatggggatttttggcctcttttttttttttttctttgagacagggtctcgctgtcgcccaggctggggtgcagctgcacaatcatggctcaccacagccttgacctctcaggctcaagtaattctcccacctcggcctcctgggtagctgggagcacaggcgcgtgccaccatgcctagctaatgtttctattatttgtaaagactgagtcttcttatgttgcccaggctgctctggaactcctgggctcaagcgatcctccctcctcagcctcccaaattgttgggattacaggcgtgagccatcacgctagccagattttggcctctttggttgagtgtcagctccccagcacagggcctgggaatctgtggaatgaatgcacgagtagtaccagactgacaactggggcagaggtggggaatcccagcatggagggacctgggcagacctgggtggccagtctgaaaggtgatgcatgtgattcaacacctggcccgagaggggaccacttaggccttcccgggtgctcatgccacagacacatgcagaccctgggcacagcctgaatgaggcctttgttaggatgaagggtttggctttccaagccccccaagcgctctgcagacattacttttcacttatctctcccccatatcccaagaggttgagactatcattttcattttttttttttttttttttttgagacagagtcttgctctgtcacccaggctgaagtgcagtggctcgatttcggctcactgcaacctccgcctcttgggttcaagcgattctcctgcctcagcctcccaagtagttggaattgcaggcgggtgtcaccctgtcccgctaatttttgttattttttttttagtagagatggggtttcaccatgttggccaggctggtcttgaactcttggcctcaagtgatccacccacctcagcctcccaaagtgctgggattacaggtatgagccaccacgcccggctatcatttttattttaaaagtgtggaaactgaggcacggagaggttaggtcgcttccagtgagggatgaaggtgggttgaacctggagccctgggaccccaggtcagtgcagcctcacatggagccagctgcctcggtcctggttgcacttgaggccttgctggctctgacactgacaaagtttgaaagttccctcctaacctccctgagcctcagtttcttcgtctgtaaatagaaatatgcaaaggacccatttcacagggcatcgtgaagctcagatgacctcgtgcacagggcccaggtcaggtggggttcctgctgtgcggggctggccattcgcatccctgacctcctggcggtgcctgttccatgcccagcgagccccagaggaacaaatctttcactaatgctcattacgggttaagctgaaccccacctttcacatgcaagaggccttccctttcctgtgggaggcaggagggcatcctgattagcaccaagctctggacccaaggtttgaggtttggctctggggccttggacagtcttccaacttccctgtgggtgaaatagtcaaaacccatgtttccatctcagggatgtgaggaggatcttatctagatcaatgcccagaaatcataatgcactgtgcctggcacagagtcggtgcccaggcagggtctcagcctcattatcgatgccactcagccctcctgccctcctctgtggcctggcttaaagtcttcctggtggaattaggcgcccaagctcagaagtttcacctgttccaccaaggactccagagatcttcatagggatcccccaagtcttcgcttggacattatgatgtttcaccttaggtgtcaagatgaaggcacacgtggtgcccagacattagtcaaacattattctggtccaggcatggtggctcacacctataaacccaacacttaatctgtgcattttattttattttattttattttatttattttattgtttgagatggagtcttgctctgtcacccaggctggagtgcaatggtgcgatcttgactcactgcaacctccgcctcccaggttcaagtgattctcctgcctcggcctcctgagtagctgggattacaagcgcccaccaccatggctggctaatttttctattttaagtagagacagagtttcaccatgttggccaggctggtcttaaaatcctggcctcaagtgattcacccacctcagcttcccaaagtgttaggattacaggagtgagccactgcacccagtcaatctgtgcattttatactttgtaaactagatctctataaggttgatttaaaatgttaaaaaagaaagtaagcagctgggcacggtggctcatgcctgtaatcccagcactgtgggaggccgaggcaggtggatcacctgaggtcaggagttcaagaccatcctggccaacatggtgataccccgtctctactaaaaatacaaaaattagctgggcgtggtggcaggtgcctgtaatcccagctactcaggaggctgaggcaggagaatcactgaaacccaggaggcggaggttgcagttagctgagacccagcctgggcaacaagagcaaaactccatctcaaaaaaaaaaaaagaaagaaagaaagaaagtaaggccgggcgcggtggctcacgcctgtaatcccaacactttgagaggctgcggcaagcggatcacgaggtcaggagatcgagaccatcctggctaacacggtgaaatcccgtctttactaaaaatacaaaaaattaactgggcgtggtggcgggcgcctgtagttccagctactccagaggctgaggcaggagaattgcttgaacctgggaggcggaggttgcagtgagctgagattgcaccactgcactccagcctgggcgacagagcgagactccgtctcaaaaaaaaaaaaaaaaagaacgaaagaaagtaaatatatatccatatatggaaaaggctaattttatggaggtcgttgtgattctaaccattgtagagggtacctaagaggaaagggagactgatcctaacaactcggacctgaccctggcatgctgctcagcctcactcagggtgggaagcctgggcactcccacactgtgtcctgtgctgccttcattgaaagaagtcagaagaagccttaggccagaggcacaggtaagtcatttgagaactctatgcccttgtggccatcctctgggccacctgtttggattttgatttgataacccagggtttctcaacctcagcactgttgacattttggaccagataatgctttgttgtggggactgtgcttgtaggatgtggagcagcattgctggcctctacccactagatgccaggggcaccctccctagtcatgacaaccaaaacatatccccgaacctagctgaatgtcccctggggggtcgggggcactaaatcgccttggttgagctactgctttaatataagacttctgccccagggcttgccctttctagactgaaaagagaccttatctcagcctcattagtagaaagatatccagtctttaaatctacccattctgagtaattccacacaaaattagagcaagatttgtttatgtgttggaaggtggggaagaacaggacacattggttctataaccttactggaagacttgaacgagggagatgaggcagaaattgaaacaaggctgaaagctacaataatcaaaacagtctggcctcaacataggaatagactcagtgggacagaatcataggaatagaatcaactaaacaggtaagagggtgcagaagaaggcacatggatagaggtcagctcattatatgattaaaggtgacatttccaggccaggtgccatggctcttgcctgtaatcccagcactttgggaggctgaggtgggcgaatcacctgaggtcaggagtttgagaccagcctgaccaacatggcgaaaccctgtctctactaaaaatacaaaaattagccgggcgtgatggtgggcacctacaatccaaactactcaggaggctgaggcaggagaattgcttgaacccgggagatggaggttgccatgagccgagattgcgccactgcacttcagcctgggcgacagtgtgtgactccgtctcaaaaaaagaaaaaaaaatgcatatcaaatgtgcactttgttttggagtggattatcttgttggcaaaaaattgaggactggtaaagtaactctcctccctacaacatctggatttagcacttttcctgcattgctgtagggaagatgagggagtgggaccttttagagactgtagtctcctacagccttaccctggcagcccccaggccctaaatagcctgtggatgtgtttgtttgtgccacaggttactttaaaaggcagcttgactcagcttgttagggtgtgtgctcagcacctagtgttcacacatttttgacacctgcctggccctgaagggtgagttactaaaccactatgttccctggttccttcaaatgcaaaatgaacatataatccttcctacctcacagggttcatacaaggattaaatgaactagtacatgcagagggctggtgaggaacatgcggtaggcctgttagccatgcggcatatgaaaaaagcctaacaaaagtgaaaaaaaaaaaaaaggccaggctcagtggtccccacctggaatcctgtcactttgggaggctgaagtgggagaactgctcgagggccaggggttcaaaaccagcctgggcaacatactgtgacctcgtctttgaaaaataataataataataataacataacaaaaaaaatcctaacatcctaacacggcagttattatcttttttttttttaagatgagatcacggcactgcactccagcctgagcaacaagagcgaaatctccgtctcaaagaaaaaaaaaaaaatttatgttgctatgttgcccaggctgatgactccactattgttattaaaaaagaatttggctgggtgcggtggctcatgtctgtaatcccagcactttgggaggctgaggcgggaggatcacctgaggtcgggagttcgagaccagcctgaccaacatggagaaaccccatctctactaaaaatacaaaaattagccaggtgtgttggtacattcctataatcccagctacccaggaagcaggagaattgcttgaacccgggaggcggaggttgcagtgagccaagatcatgccattgcactccagactgggcaacaagagcaaaactctgtctcaaaaaaaaaaaaaaatacaattcattatgagccagatgtgatagctcatgcctataatcccagcacttcgggaggccaatgcaggtggatcatttgaacccaggagttggaaaccagcctgggcaccatgggggaaaccccctctctgcataaaatacaaaaatcaaccgggcaaggtggcatgcacctgtagacccagctgctcgggaagctgaggtgtgaggatcacctgtagtcccagctactcgggaagctgaggtgggaggatcacctgagcctggggagttggaagctgcagagctgtgactgcaccattgcactccagcctgagtgacaaaacgagaccctgtgtcaagaaacaaacaaatattattgttttagccgggcacagtggctcacacctgtaatcccagcactctgggaggccgaagagggtggacagatcacttgaggtcaggaatttgagaccagactggccaatgtggtgaaaccccatgtctaccaaacaatacaaaaattagctgggcatggtggcatgtgcctgtaatcccagctacttgggaggctgaggcaggagaatcgcttgaacccaggaggtggagtttgccgtgagccgagatcacgccactgcactccagcctgggtgacagagcgagaccctgtcttaaagaaaaaaaaattctgtttaatgttatagctttaacgtaacatttgttatgttttctatatcataaatcatacagattatgactagaaaaaatgtagaattatacttctgtgttctagtagtttttatctctgtgaatgggagtgtggggaaattggagactattctattttgtctacttcctttgtgattgcctttttatttatttattttttttgagtcagagtctcactctgtcacccaggctggagtgcagtggcgtgatctgggctcactgcaacccctgcttcccgggttcaagtgattctcctgcctcagcctcccgagtacctgggactaccggcgcccaccaccatggccggctaatttttgtatttttagtagagacagggtttccccatattggccaggctggtctcaaactcctgaccttgtgatccatctgcctcgatctcccaaagtgctgggattccaggcgtgagccacggcgccagcctgtgcttgccttttgagcattcaagtctccactaaagactgtctcctttacctgagcacctcttcgtaatgccctctctccccgtggtttctcagcccttggcctttcttcctagcactgtctggcctgagggttttatgtacatggtgcttctggtcttcctttcaatgcttcttgagggcagggacttaacctctcttttgccactgtcccctggcacaggagaggggctggcaaactgcctgctgagtgaatgaggaaatccactcaccacctggtgagattatcaaaggatggaacagcattttccttcctaaacatctactctgggccaaatactctggagctaacatgtgttgagtgacgcgtgcatctcagctcccagttcctgtggacaatggagcccctttcagaagatgagctctctgtctctgggtacgccaggacctgccacacccttccctttcctgccccttggcttcgtgttaggatctccttcttccatcctccccagttccaaagtcagctgttcagtccagcctgacggtgcagtccagctgttgggaacccctagctagcctagcccctccccaggctgtgttacagacacgcacagccacgtggctccctggcctctgctgaagcctttgtcctctcagcatttcttccctcttgctctcccttctttccttccttcctcttttttttttttcccattaaactgatttctttttgtttttgagacggagtttcactcttgttgtccaggctggagtgcagtggtgcgatcttgactcactgcaacatccgcctcccaggttcaagcgattctcctgtttcagcctcccaagtagctgggattacaggcacctgctgccacgcccggctaactttttttttatttttagtagagacagggtttcaccatgttggccaggctggtctcgaactcctgacctcaggtgatccgcctgcctcggcctcccaaagtgctgggattacaggcatgagccactgtgcccggcctataacagtttccttactgcttacctcctccaggtcaacataagcttcatgagtctggggatgtcatcagttttgttcctgttctgtatcccagcacctgcaatagagcctaccacaaagtaggccctgaaaaaaactgttgactggataaatgagtgcatgccctcctggactacaagctgcaagaaggcaggtttcctgctcgttgacagcctagcagaggtcccgactgttgaatgaaggaatgagtgtcttaagctcccctcatttgccgattcacctgaggactactgacctggcagatggacctaggaggtggacctggctgatgaggggtgcagggaggtggctcagtgtagggctggggcacctgaccctggaggcctgggggtgtgggggatggtcagcctcagaaataggattcagtctgggtcagagagcccctatgctatgagaatgaagagaatctcaatgacaatagtaacagttatgctcgaacacctttttttgctattactgtctaaacactctatctacattttcttctttaatcctcaaccctatgagataggcactattgttttgttttgttttttgagacagagtctggctctgtcacccaggctggagtgcagtggcgcaatctcggctcactgtaacctccacctcccgggttcaagtgattctcctgcctcagttcccaagtagctgggactacaggcgcgcgccaccatgcccagctaatttttgtattttttagtagagacagtgtttcaccatgttggccaggctggtctcgaactcctgacctcaggtaatccacccgcctaggcctcccagagtgctgggattccaggcatgagccaccgcacccggctggcactactgttgcttccatgttgttgaagaactttgattaagatatggcagagtcaaagtgtggactagacctggcttccaacctgtgatcttaaccacgagcttcagggacaagagtgtggtgcattctgggaaaggcagacaccacctgccttccagctccacgggcaactctcaataaaatatgacatttaaggcagttgagtcccctattttctaatgctgagtgccataaagcatggcccccacctttgctctctgtcttcagccccccactagagcaggccgtagctgccagtgccttgtagagtccgagacaaagaaaaatgtgcgcctccatatgcatttaccaaagaagcctcccaagtggaaacagttaataaaaactcaacatcaacaacaaaatgactctgccgggcatggtggctcacacctgtaaatcccaatactttgggaagccaaagtgggaggattgcttgagcccaggattttgagaccagcttgggcaacatagtgggagctcatctctgtttatttgtttgtttatttttttgagatggagtctcactgtgttgccaggctggagtacagtggcacgatctcggctcacggcaacctccacctcccaggatcaagcagttctcctgtctcagcctcccgagtagctgggactacaggtgtgcaccaccatgcccggctaatttttgtatttttagtagagacggggtttcaccatgttggccaggatggtctcaatctcttgagcttgtgatctgcatgcctcagcctcccaaaatgctgggattacagacgtgaggcactgtgcccagcctcatctctatttaaaaaaaaaaaaaaaaaaaagcggccaggcacagtggctcatgcctgtaatcctaacactttgtgacgctgaggcaggcggatgacctgaagttaggagtttgagaccagcctgaccaaagtggagaaacctcgtctccactaaaaatacaaaattagctgggcatggtgacgcatgcctgtaatcccaggtacttgggaggctgaggcagaagaatcgcttgaacccgtgaggtagaggttgcggtgagcccagactgagccattgcactccagcctgggcagcaagagcgaaattccatctcaaaaatataaataaataaataaataaatatatatatttttaaaaaaagcatgactctggataaagccccttcttgcccaatctgtttgctcgccattgtcaactcctatgacagcaagggtaggggacaaagaagggcttggaactttgagctgattggaaataactggggtggaggggaaaataaaaggaaataactatttccattgcacaataatacagggcagtgaaacaaacaacagtctgtctttttttttttttttttctgagacagagtcttgctctttagcccaggctggagtgcagtggtgcgatcttggctcactgcaacctccgcctcccagggtcaagcgattctcctgcctcagcttcccaagtagctgggactacaggcacataccaccacatctggctaagttttgtatttttagtggagatggggttttaccatgttggccagactggtctcgaacgcctgacctcaagtgatccacctgccttggcctcccaacgtgctgggattacaggcatgagccaccacacccagccaaaaactatttatttaaaacaaagtcaaggtcttaatgagtggtgttgagtagggtaaagttattgtgtaaaagcctaatttgtgataagattaaagaacatccttcagcacaaaaagggttcacagatctgagtcacagtgagggataaagaaatccctattctatacagttatagttttggaacacgcaggtttgattcagtgtacacagttttaaagtctcacatatgaataggagaataaataatatcacccttgttttcatagcaatcatttatgccagtgggtctcaaacttcagtgtgttccagaatcacctggagagctggtcaaggcacaagctgccgggctccacttacagatcttctgatttcaaggggtctgaggtggggcctgagaatggggagttctaacaagttcccatgggatgctcttcgtctggggccttatttgagagccactgctttgtgctgagtgcaggattttttttgttttgttttgtgttttgagacagggtctctctgtcacccaggccggagtgcagtggcatagtcatggctcactgcagcctcaatctcctggggtcaagtgatcctcccgcctcagcctcctgtgtagctgggaccacaggcacatgccaccacacccagctcatttttgtattttttgtagagatggggttttgccatgttgcccaggctaagtgcaggattttaatggataagaactttccaaatggcaaataaatgacattggacgagggcgtaacagatctgtttacgcagcagtaggacatctttaaccaaaatgaaaacgcattattgcctcgtaggataaattagggtagggaagtgttatgaatctcttttgagcatatctaggtttctttttttttctcttttttatttttgagacagagtctcactgtcgccaggctggagtgcagtggtgtgatcttggctcactgcaatctccgcctcccaggttcaagagattctcctgcctcagcctcccaagtagctgggactacaggcatccgccaccatgtccggctaatttttggatttttagtagagatggggtttcaccatgttggccaggatgttcttgatctcttgaccttgtgatctgcctgccttggcctcctaaagtgctgggattacaggcatgagccaccgtgcccggctaagcatatcttttctcttttttttattttttgagacggagtctcaatcagtcgcccaggctagagtgcaatgatgcgatctcggctcactgcaagctccgcctcccgagttcatgccattctcctgcctcagcctcccgagtaagctgggactacaagcgcccgccaccgtgcccggccccagccaagcatatctaagtttcttaaggaaaggaaatgttggcctggcacggtggctcatgcctgtgatcccagcatttgggaggctgagacgggcagatcacaaggtcaagagatcgagaccatcctggctaacacggtgaaaccccgtctctactaaaaatacaaaaaattagccaagtgtggtggcacgtgcctgtagttccagctactcgggaggctgaggcaggagaatcgcttgaacctgggaggcgaaggttgcagtgagccaagatcacgccattgcactccagcctgggcaacaagagcgaaactccatctaaaaaataaaaataaaaataattaaaaaaagattttattcagtggaggtgaaaatatatatatatatggtctctaaaaatttttgattggtgtgtctggtactgaaaagggcttggagattgatatttattttatactacagagtatacagagtagatctaaagaataacattttttctttctttgaggttctggttttaatttggtgttgatttttgctggctagagttcccctctggatctctgggttgccacggtgacattttggcctttatcacattgctgttgtttttgggcctgcagctccactgaaatgagttcttacatgcaggactcaggagcttggcactgggtctagggaagcccatgtttgtgtgccacgtgaggaagatgagggagagaaagttaagataccacagtctggctcatgggagtttaaaaagtggacaaaggagaaagaactgtcccaaaaaggtgttgctccagcttccttgcagacccttccagtgggtgttatctcgaggaaagggaccctggggaggttggaaccttgtcgaagtgccaatttttcatcctcatgtattgtgacaggaaaaggtgctccagtttctgaagacaggtaatatatttgggcattaacaatggttatggcatcctttggttttttaaattgtaaaagtagatattggccaggagcagtggctcacgcctgtaatcccagcactttgggaagccgaggtgggtgaatcactttgaggtcaggagtttgagactagcctggccaacatggtgaaaccccatctctactaacaatacaaaaattagccagttgtggtggcgggttcctatagtcccagctactcaggaggctgagggtggagaattgcgtgaacccaggaggcggagattgcagtgagctgagatggcaccactgcactccagcctgggtaacagactgagactctgtctcaaaaaagaaaaaaaaaaagttgatactgtgttacatgttttttttttcttcttttttttttgagatggggtctcgctctgtcacccaggctggagtgcagtgtcgccatctcggctcactgcaagctctgcctcctgggttcatgccattctcctgcctcagcctcccgagtagctgggaccacaggcacccaccaccacaaccggctaatttttttgtatttttagtagagacagggtttcgccgtgttagccaggatggtctcgatctcctgacctcgtgatccacccacctcggcctccgaaagtgctgggattacaggcgtgagccaccgcacccggcccactgtgttacatgtttctttattgctgctgctgtgattgtatcacatgtaactacaacaacaataaaaatcttcctttctggattaaatttttaaataaaatcaggatgttaacagtgatcattgtgcttattttgagaaataattataacaggatatattaattgcaacccccgcaataagaaaaaacaaaaaccaaaacccaaccgtaaataagtaaaaagttggctttctctctacacctcccctcccccaaccccatcctcctgcctgggtgtacctttcagttactcctgtagcagggacatacagaatggcatgtgtcgctcttagtgatcaaaatcctagtcaggcctccaatgaagatttattttccctgcatttttgtattctgcctattttttggcccaagaagtagccagggatgaatgtttaaaccctttttccatgaaagtgtcgctgtgctgaagtcactttttgttttgtgcagcataaaaatgcacattccattcttttttttttgagaccgagtctagctctgtcacccaggctggagtgcaatgggatgatcttggctcactgcaaactctgcctcctgggttcaagcgattctcctgcctcagcctcccgagtagctgggatcacaggcacgtgccactgcagagtagctgggattacaggtgcgcgccaaggcacccggctaattttttgtatttttagtagagacagtagagacatttcaccatgttggccaggctggtcttgaactcccgacctcaggtaatccgcctgcctcggcctcccaaagtgttaggattacaggcgtgagtcacacgcccagcctctttgtgcatttaaaacactgcctttgctgggcgcggtggctcacgcctgtaatcccagcactttgggaggccgaggcaggcggatcacctgaggtcgggagttggagaccagcctgaccaacacggagaaaccccatctctagtaaaaatacaaaaattagccgggctcgggcgtggtggtgtatgcctgtaatcccagttactctggaggctgaagcaggagaatcgcttgaacccccggaggcggaggttacggtgagccaagatcgcgccattgcactccagcctgggcaacaagagcgagactccatctcaaaaaataaataaataaataaataaataaataaataaataaaataaaataaaacaaaacactgcctttgaaggctactggggcactggtaaactctgggagaggttaccagcaggtgggtggaactctgcttgcctgctgctgcttttttatttcttctaaggcatatgtagagcaatcttggataagttttcaactcacctctcttggaaggaagctgtttgggttgcctgggcaggttttgtgtgaaaaccagcaagaactcagatgatgagaagcagcttctgtacaagtctgatttctcctgcctggcctgggtgatcacagtgggtcccgggatgtttaaactgatggtagagtcaaccatcagcatttatttctgtgtttacagtcttcttattctattttactgggctcttggtttttgcttgcctgcctaccttcctttcttccttccttccttccatgtactttgcccctttctttaaggcaaattagcatgtaatgtgcaaaccaatctctctggcacttaaggaagaccccaaaccccactccctttcttcccctaccccaagaattcactacccctggttcaatttcagctgaacccggaaacctgtgatgtgacatgaaggctgagaattcccagaaatgttaatacttttggtcttagaaactaaccaactaaaaaaaaaaatcccttgccagtaagaggtaggctacatttaaaataatttctgactgaagaagtcctacgtaccgcttgtcatatacatatgtaaagataatttaaaaccctagggtatacccttttcaaatgcagagtttatagtttccaaggggaggagggcaggggaggagtaaccaggacctttcctgccagtcttccaatcgcgatagctcgttttggctgtgaatttccccccttcccctccccctcccgttaattaaataaacgctggaagcgtgtgtttaccgcacacgactcggccctcggggaactctttttctacgtctctcctactcttaaactcctcaactcacagagggttggagagctggcaccatgagcttccagttcctacgggtgagaaaagaggtgtctgtgtggagggcaggtgcgaccccgggggctagcagagaggagaggctgcgggaggactcgctgcgaagggcgaggggtggcgctgggtgggacgggcgcctggggccgtgcagggtggctcctgggtgctgcccgggctgcctgtcgcccagtactggcgcaggaagacgggtccgcgcagcgtctggcaacagtggcctgctccacgcctggaggcgaccaagttctgagttaaaggcgccgggcttagccgggaagtgtatggcgacccagaacacggagcggagaaggcctcaggggacacgaggctaccgccttagtcctcgggcctgcgctccgagcggttagggtgcgtacggatgggctccgggatgttagtggagaggtgacaggagtctaccatcccacggccaagcgtgtgaggcctccggcgggcgggggtcccccccggggcagggcagggggagagtcaggcatgtctctaacgggctccctagtagaaccgctaggaaagtggccttcaaccctaggcacctttgtggctttcaggtagttgggcgactaaaaattcacttttgcctgctgtgaaatgggacaggtggttgtcaggttagagactgtgcccacgaagtctcgtttggcgggccgggactgacgtggacccgggccctcctcggaagcttgggaacctgtgagcccctcagctcctcgcctcactttgcctgtttgaaaaaaggagttgtttgagaggaagagttaaggctcaaaaggttctaaacgaagagcatgcggcctgacgcggagcgcaaagaagcgagcagtgaactgaatctggtgggactgagaccagaggcgtctgtatgcggcggccgcttcgcgccctattaaagcaatctgttatttacgataatcatttttgtaattattttggagtggctgtgacttgatgtctgtggtgccccagggcatgcccttactggacatagatacttcagggtgccctttgacgccagtgtcggtccagtgggtgccagtgccgcgaagggagggtggcgggcgtgaatgccccctcctcctgggtttgccgcaggccccggcctttccaccttgcttgatcctggcgggtctgccacttactgaggtccctaccggcgctcacgttgtcccgagaggcgggacaaacgtccggcgcgtggcgcggagtctgcgaaagcgctcgggggcctccatcttctgctcgggagtcccctccctggggcgggaagaggagtcgcagatctgcccgaatcttgctctacccgcctggccgccttcttccgtctggggtgggggcaggggtggcggatgactcaggcctggggccgggagccctgtttccaaaggcaccacctcgcgcctctttggaagtggcgcgctgttggggcgctcccgctgttgcagaggcctggtttgcggtttcataggggcgtgggtccagggcttccagggagtaagtgagtttaggctccctagggggcggtagaggggaacccccgacaaccttccatcctcttctccaggcggctgcgaggcctccggggttccagaggggtccccttctgccggtgccggctgtcttgagcgcggccacgcagtccgcgtcttcacgtgggcaaggggcggggacgttggagggaggctgtcttggatgctggagccttcggttcccggctctgctgagcagaaaagttgaagtcaaggaagggttgaggcttcctcacaagggcgcgcgcgtgcctgggtgccggcccagaagccgagaatgtgcgtattggggaagggtctcccgtgccgagaagacagaggatttgttctagctgccttccgtacagagggcgcggaggttgcgctccagttcgaacgcttacccattggaaagagggcagcgccggggtccagggaagctccttgggaatgaatggcctttgccaagcggttccggatcctctgggtcctttgggcccacggcacggtgctgcgcgagccctcagtgcccatcggctcccttcgcctcctgcgtagacgctcccaggcggggaggcatatcggttcctccgggcagctttggctagtgttgctgtgggaaaggagagccagggcctgggatgggggatgagcaccttcttgcccattccgggccccagcgtgcaggaggtaaacttgccagcacagacaagacagcttgttcaagctgcacctcaggccgggtcagagaataaaaccgagggctagaaggcccagaatgtcggacagcccagcggcacccgtcagggagtcccaggcgcccgaaagaggcgccgcacctctggcgagtctaggacccatcttcctggacctgtgctctggagtgcctgcgggcctgggtctaatttctgcttctggcaggtgtccccctcccccgccgctaataccaggagcgctgcttctgcggtaacttattttacccccagaagcctgttttgggaccgaagtgtcagggtcctgtgtgtctttttatgcactgttctccttagtgcaaagccctgcagatatgcttggccgaaaagtctcagtggtttcaacttccagattttgttcccgcgtccggtcggaaaatcacctgggatttggctgctgtctaaggccgggggaaagtttcccttggaggacgcctattattattattttcttttaggcccacctgggtctaaataaatgctaaagttcaaacgaacccgagaaggaacagcgaggcagtggatgccgccattccgtggatgggagagtcatgtctactgcaggtgcggacaccgtactgataggcattgattattgcaaaatcgtattcagtatcaaatagaaatagtcttgtcctctaatccccacagaatgtttaaatccagcccagggagccagttggggcgtcccaacaaatacgccctcgagaattagcgatgttccccttacaatgaaagtcaattgctgcataataactgggccaaagaatttcgttagtttaaattttaaaaattagtattgcactttgctttcaagtttgggtggcaagtaccgaaggggagagggaagcagcgtttgtgtggaaggaagtttcgttttctgtctaaacatgtgggacctgggtgtctacctctccagtcgagagctctctgcaggctctctcccaacttcctgcacctcctcaccctcaccttacccgtggcgctcgggttttattcctgcccggcgcttctttcccagggcgagtagaggcttctgagtgaccggcccgccagaggcagctgcagagccggcgttccgcagggcagggcagggccgggccgctgggctggtccagtgcgcgcgggttccccctggcctcagccagccgcgggagatgccacttcgggcgacagcggcgagacgccgctgtccgcaactcctgggcgggtaggaccgtctgctgcctctgcggcccttggggcagactccccaggagtcccttcctctctcctcccgcccgggggccgggaccgcgctgtgcccacggagggaactgggcgtctctggcgcactggggctccagctgcatgatcccagctcagaccttaagcctcagtggggtgtaggtgggatgggatgtgtttttaggagatgaggagaccccggttgttgagtcgctccccaaatgcgcagtttcttaactccaggtgacatccgtcttttggaggaacgagtgaaggccgtttaggcgaaagaggggtgggtttcagtatttggatcccttcccccagctctgccaatctcaggtgtgtttacggtggaggtgacagaaggaaggcgcgtcgggggacccaggcctcgcaggtcttcggctgtcaacgaggcaccgcccactgactccgcgcttcgtccctcacagcgtggggctcggcgctgcgccaggcccgggtgcggggcggagctaggctgggactggctgggggccgccccgcccggcgcctgggcctccgcgccggcccccggggaggagttatgataatttccttctcattaaggcgctcgggtcccccggctatcgccaggacacactgttcgggcgcggctttccccgtccgcggagcggtcttgacactcgcggcggcagcatctacgctcgcagagccgccgatgcgtgtccagtgacccggacagcaaggcccgcgcgcggcgggggcggcggcagacgcctggtcaccgtgaccccgattttggatttaccgcttgggggctggggggatcctggatttaactggcgactgttttgggggacgccggacgccatgttgtggaaaataaccgataatgtcaagtacgaagaggactgcgaggtgagctggggctccggggtgcagccccgccccgccgaggacagtccgggaggcaggggccactggaccgaggtcggggacgagggcataggagccctggcctctcggtgggacgggatccacttctccggacaccccttagtccatttctgcggggcccctttcctgtatagggccttttcctaaatagcctcccctcgggaacgaggcctggaaagagaatggcaaatcccacccacacagcttaccgggcgctttcctaagcggcaaacagccctgcttcccgttttctcggaaaagtgccccgtctgcaaccctcagacgtggcttttacgcacgaagtctctgtccaaaggggtcagatgaggctacctgctagcgacaccttggcggacactcctccaaggccggcttgtcacctgccccgctacctcctcggggaagcacgaaaacaaccgaagtttggctttcaaaagaagtgggggctggggagtggtggtgggggtgcccgaggccagatggggccgtaagagctcgcgagtgctccagcctgtcggacaggttgagctagagtttcggagagtgggagggaagaaggaggcggcgagcgggaagaggaagaagacgcaggcagcgctaggcgagctcaggggcgccgggagcgcggagctcgggctacggactcgcgggagttcactgcgcctccgggccctggagggctgcccctgcccgcaggcccgggcgcttccgccaggaggcgacagcgccatgttcctccaggttcccggcgccccgagacccctgggcagatggggacgcatcctttagaaactgagtcgggccgcccaggggcgagggaacgtgcgcgggcaaggctgcccaatttccagggttcttcatgccccctctgcgccccgacgtgcgagaacactgcccttggcagtgcagggcgcccccacttattactcccctcggctgggcccggccagcagggagggccgccctgtgcgcgcgctccctcttcacttcccagggcggcgcagggtggcgggccctgctttccgagcgccgcccgctcggaggtctttgtcccgagggcgtggaagggagggtcccgggggcgggggaggtgcgcatttcccgcgccgcgcactctatccgcgcctgccgcgctgccacctccagcagtccctgcgtcatgggcgggctccacgagatagctctgcaccgggcgtccggctccttcgccccgggctctggctccttcgccccgggctccggccacggacttttctggcccaagacccagggttcggacttggcgcctccaagcgcctcgggcttgggagcagcgcctagaccttcgccgccgggctttgagaactcgttcccccaggtctttcaccagactctcctccctccccgcactctttgcttacaacgaaatcctcggggcgcattgcccccgggtaccttccgaccctgggcaagccccgccgggcggggtgcggttggtcccccggggccctctgcgtagcccggcgatgccggccagttcgcagtagcggggtttcgcactaacggggtctcctgtttttttttttccctccaggatcgccacgacgggagcagcaatgggaatccgcgggtcccccacctctcctccgccgggcagcacctctacagccccgcgccacccctctcccacactggagtcgccgaatatcagccgccaccctactttccccctccctaccagcagctggcctactcccagtcggccgacccctactcgcatctgggggaagcgtacgccgccgccatcaaccccctgcaccagccggcgcccacaggcagccagcagcaggcctggcccggccgccagagccaggagggagcggggctgccctcgcaccacgggcgcccggccggcctactgccccacctctccgggctggaggcgggcgcggtgagcgcccgcagggatgcctaccgccgctccgacctgctgctgccccacgcacacgccctggatgccgcgggcctggccgagaacctggggctccacgacatgcctcaccagatggacgaggtgcaggtgagcggcgctgcggctcctgaccggacctgttcaccctacggccttctgcccccaccccgcactcctctaggctcccccgaacttaagggaattttgtcctctctcccccagaatgtcgacgaccagcacctgttgctgcacgatcagacagtcattcgcaaaggtaaatagcaaggtggcatcgtctaactctggtcacacgatctgggcttgtgaagttgactggcaaggttgggggtatttggtggccagcgtgggacatttgtggtagaagggactgaaagggattcatggaagctagattttaggagtgacagaaagggatttccctccgacctcctaggagctgtctcttcatctccggagttgttactgcctagttttttttcttggaaaaatgtccatgaattccagtgggtgtttcacaatgtgagagaaagtcttccagagcgagtgaacactgatttaacttgaaaaacaacaagaaaaaagtcacaggcacaccttcgttgagtggttggttctgtaacaattttaattgttgaataagttgtgattttatttttgatttcaaacacgtgtatggaaaacctccttaattctgacctgcaagaaaagttttgaagcaatttggcctaccaaatgaatacctgtaaaaggaacagagcttggaatgatctgtcagagggagagttttgcaggatggggaggaggggatttggaaaattggattacttggtgagtgagtggtttatgaaattaagttacttaactgacaggattaccaggattaccattttgactgttttgggaaatagagtaggcctaaattgaaggtagttttggcctgttacttgaactgcttaaatggattgaggatggaggaaaaatggattttaaagaaaaactcagaaaagactacaaattttcagtaaacttagaacgtattagtttggatgattaaatttactgtgatcaactgcactgaaaaattttggaaagaatcttaatgtgtcctatgattttggttgttcttgaggggaaaaaactcaccgtttatttagtattgaagcagtcttctgaaaacaaatgttctaattaaatagttttcagcagctgctaggaaaaaaaaaaaaagaaaccctccaagctttggatcttcactaattaacttcccaaggtgttaacttgtgaatttcagattagatttgtctctgaagtagggggcttttttaaaaagtcagccatggccaggtgcagtggctgacacctctaatcccagcactttgggaggccaaggtgggcagatcacttgaggtcaggagtttgagaccagcctggctaacatggtgaaactccatctctactaaaaatacaaaaaattagctggatgtagtggtgggcacctgctggagaattacttgagcccgcaagctgaggctgcagtgagcagagatcacaccactgcactccagcctgggccacagagtgagactcttattattttttttttttaaataaagtcagcctgcagttgatcgtggggtgtgcaatgatgcttgtctaaagatcactttcagctttggttattggttttgaaaaggtctcttttgctcagagagagctcttgtgactgccagctctgaccttcattcacaggtcccatttccatgaccaagaaccctctgaacctcccctgtcagaaggagctggtgggggccgtaatgaaccccactgaggtcttctgctcagtccctggaagattgtcgctcctcagctctacgtctaaatacaaagtgacagtggctgaagtacagaggcgactgtccccacctgaatgcttaaatgcctcgttactgggaggtgttctcagaaggtacttggggcacaattctaggcatagtggttgggtagttgaaggtgagtgtatcagaggcccaggaggtatttttaacatttatgtgactttatgcctaacactgaattctaatcgggttagagttttagtacatttcttctcctttagaaagtgccaaatgtgggaggaagtgctaaaacgacgctcacaaattctcacttggttagaatttgatcccatgtatgaagtgatagcatctgtattgaggggaggtggggggagcaccctgggtttgttccccagggagtttttgtggggccgttgtagtttcacaagtgaaaatttgtctgctcccatacaatttgaaatattcggtgatgcagagttggatgctaggaaagattgattttgtatcttacggggactaattgaaagaggaccctgctatcacttttcattatggttcacgtgatgtagatagtctttgatgggtttcagctttgacagcagcactttaggagtttagaatttttaaagtgtgcgtgtgtatgtgtttttgtttttgagagtagccagagtcaatttttctttttcttagagccaaatcgaaaaatggaggccggtccttgcgggagaagttggacaagattgggttgaatcttccggccgggaggcggaaagccgctcatgtgactctcctgacatccttagtagaaggtcagtggggttttgtttttggttcgtgatgtttttaatttgtgcctgtgtctttaatacttattgcagaaaaactggaaaacaactcttaaaacttggttgcaagtagagatgaaagcaattggaattgttctctaagtttattggaatgaatcacagttaattttatcgaataagttaacatttaagtatctggttgctcaggtaggctcttctgtattcccccagagaatcaatgttggaaagaaactggttttcctaacctaagaaatcacactctaggggtgtcggcatttcctgttaaatgaaccagtttttttggaagataacagctgatcatttggtacaccttgagtaaaagctggttacttactggtgagcagaagtactgcttctgttttttgtagctgtgggttattttgtagctggggattgtggtcagtgaagagaacctcttgtatacaatacgactggcccgattcacaattctattcttccctcccatccaaagaaaaaaactaatcgaacccctggcccacgcacaagttcctcttgccagtgctaagatagtaggacatagcatttcagtttcttgaatggggggcccctttaccccaacctggacagtagccaagaatgcaacacaacctttaaaaggagctgaagggaaagtaaaataattttttaaaaacaaaacaaagcatgttgttactgctcccgggaagagttggacgctgagagaggcttagggctctcactatgggcaggggaagccaaggagaaacgggctccccgtggcagtaccctcttttgaagactttctttccttgctctgatggcgtgacgtggtgctcaaagagacttggcagagtccctgctttaccttttacgagtgcctttggaggtcagggcaaggagaaaggagctgcctgtctgagaacagctgtcctgcctgtagaatcggcggttctgctggggtttcttgctagccaggcagggtgattgaataagaaagtgtgctccagaacaatggctctccaaggctgcttcagtcaacccagggggcccctccaccatctgggtttttgcaaagctcaccagtcctgcaccctggagccagggaaggtacctcttgggtgggagaaactctcttggttgcctcccttagctcttccactgacttggacagggaaaagggtgctccaagttggtttttaggagaaacatccctcccatcttttttaaaagaaacattctagagatctgccccttcagtaaaaaggcactattaaaaaaaaagtaagctgtcagatgtcaccattttatagagaagtgactagtttgcttttgtcaaacatgtttatagcccttaaattttcctacttccccaaaatgatactacttaatataaagagaaaacatgggtatgtttgattatctgttgagcagaggactggtaaacatttttcaagtttactcatctcagtatccatggggcactggttccaggtcccataccaaaacctgaggatgttcaaaatgttatatttgtatataacctacacacatccttccgtatagtttaaatcatctctgcatcacttacttataatacctaatactatgtaaatgctatgtaaatagttgttacattgtattgctcagggaataatggcaaaagtctgtgtgtgttcagtacagacacaaccattcattatttcccccccgaatcttttcaatctgagtttggatgaatacagattctgaacccacggatacagagggctgacttgattgtgcagttagaagtttcagggtcttttctgctcacattgtgtgatctccaccctctattcctggggtggaggacctactgagaatccctagaaagttctacctaccagctgagttgtctgccctgtatatgatttcgttcttgcatgcaacgtatgactggtagacaatgaatactactagaaagagagaaaatgggggctgggtgctgtggctcatgtctataatccctggcatgagccattggttgagaccaggagctcaagaccagctggccaatgtggcaaaaccctgtatctactaaaaatacaaaaattagctgggtatggtggtgcatgtctgtaatcccagctattcaggggctgaggcacgagaattgcttgaattccggaggtggaggttgcagtgagcagagatcgggccactgcactccagcctgggcaacagagcgagactccgtgtcaaaaaaaaaaaaaaagagagaggaaaagggcagtttggcctcagtgaccacagccatcctaaaagctgttgctgattattctaggtgaagctgttcatttggctagggactttgcctatgtctgtgaagccgaatttcctagtaaaccagtggcagaatatttaaccagacctcatcttggaggacgaaatgagatggcagctaggaagaacatgctattggcggcccagtaagtatctgaacttgaatttgatgatgactcaatgctctagaccttgaggttgagaagattccccctccacagtcccgatggctcaacaaagaaatattcttgaaataaattagggtggagcaaaagaaaatggcaagggagcttcttttacaaagtcaaatacattaactttttgtatgatttagaagagtgcatgactcagccatgagtatttttgagctgcttagttattcaacccaaagtagttgagctgccctttcattattgtgttagcatatcttacaaaaatgtgttgaaaacccgatttgttttgtcacaaccagtaaagagagattgtgtgccttctacctcctgatagcaagacttttgtctttcaaatgtaaagatcagggtggatttgtgggcaaattaactgtctccaaaacgacttaatgcagctgtgggttttctcatagaaaccaacagtaagttgatttgaaaatgatggtaaatgaagcagaactagtcgagccaggaaatggggtaaaagagagcgcagtgaaccaggctgtgtcaggagtcagaatttcagggggatgcttccttctcccggttcctcacggaatttgtttattggaaccaacttgtaccaaggtaaactgtcccttaagctcatgggttggaatccaggccccattacttttaccagtcctggtgaccttggccagttagctggggttaagttaatcctgttgtcttttctaattgcagtgaggattaaataagatagtgctttaaaacagcttaactcagagcctggcgcagaatagttgctaagcgcagcagttggctattagtattaaattctccttcctcgggttgaagcagttgtgcttgcctcccgggcgccagcctcagtgtagttggttctgtgctcttgacctgtaaggagctagatggaactcatcgagtcaactgactgtcttcacaggcaactgtgtaaagaattcacagaacttctcagccaagaccggacaccccatgggaccagcaggctcgccccagtcttggagacgaacatacagaactgcttgtctcatttcagcctgattacccacgggtttggcagccaggccatctgtgccgcggtgtctgccctgcagaactacatcaaagaagccctgattgtcatagacaaatcctacatgaaccctggagaccagagtccagctgattctaacaaaaccctggagaaaatggagaaacacaggaaataaaattggaacgaagaaaggttaggagagtagggaaggaacaggactgcaaaaatccttctccaccgcacagactgggaacccctcctggcctgggggaagagtttgttacctaccttactatttaaagagccttcactggttctgcatcacccgcccctggacttcttagttgtttctctagcgctgagctatctcctaactttggacctattatcagaaggtgacaagtactggctctttattcattaagctttttttttttgaaccccattctttccttctctgaaagtggtgctataagttttagaatcttttaaatacattccctgggccaacagacccacacacttagccattgaaatgtcaaattgatgtgccctagatcaacagatcaacaataccttttttttcagtgttaaggtaatggttggtttttgtgtccgctaaatatttaccttgaaaaaaagaaaagtgtgtatctagcttcttcagagatcaagtcctctggtaggaggcaaaggttctatctgcttagcaactagttaataagtggtatctgacacactctaaaccccgtgttcaaacgggggccttctggttttaggaaacttgtagaaacgaagcctgctgattgatttttttctcctttttttttttttttttttttaactttgaaagttaactcttcaaatgggagactctttgaaatgacatgttcctttaaggtactgaagctttatttgcatatttatttcagatgtttcgagtaaacttgaaaagggtaggcacgaagcaatttgttgctgcttgtcacccccaagtccccgtggaggttctgtattttaagaaacagtgcgttgagtgtacagattttatttatgcgtaatttaatggggtctgtaaatactggtgcacttcttacgacttttttgagacatgggatccaattttaatattaacttttaatggtgatggggtaatctataacacatcataaggttttattcatatatatacagggtattaagaattaagaggatgctgggctctgttcttggcttggaagattctatttaattgaaactctctgttcagaaagcaataactttgtctcgttcctgttgggctgaaccctaaggtgagtgtgcagtacagtgtgtgtgggtgaaatggagatttggaattgaactctctgcctgtaaatgttccccaaataattgttgtgtgtatgatacgtgtataataaaagtattcttgttagaatctgaaagtctggctataggtttttgtttttgcttttgttttaaagtcttttgggtgaatggaattagggcagagctgatttatggcttgactgtggcttggttaatgccctgagcaggcaagttttgtgtgctgttggggaggaacctgaagtttcaccttttctccctagcgacactgttcagctaccccaggccttatgctgtcatcagtgtctctcaactgcagagggatagaatcatcctccccaccctggaggtgttgggaaatgtctgagggacagtttattgacattaagaggggccaatgttttgggaacaatgtctcatggaaggttactgtattgaggacaggtacactggcatactgtactcagcatactgtatagtggtcaagaatggaagtgaaatgattatgggtgttctttgggcagatgtttctctcttttttttttttttctttttttaagatgaagtctcgctcttggccccaggctggagtgcaatggtgtaatctcggctcactgcaacctccacctcccgggttcaagcgattctcctgcctcagcctcctgagtagctgggattacaggtgcgtaccaccacacctggctaatttttgtattttaagtagagacagggtttcaccatgttggccaggctggtctcgaactcctgacctcaggtgatctgctcgacttggcctcccaaagtgctgggattacaggcgtgagccaccgcgccaggctgggcaggtgtttcttaggaggacttggcattcagtcgaatgcaagcagtggacgtgcagcatgccagtgttttccattcatctaagttctctttggaaatgagatcgtgctcatccacccaagacatcctcttcatttcatctgcctgcaggggaaaccagagattgagtctttgtgctactccaggagcagaggagtctggcaggggttatgtacttgctggatgtttgtgatgcacacggcaggtacttgatctcgagttgaagcagcctggcatctcctccaggaagtgatgtgtttagagtttgccatgtgtggcctggcttcaaagggaactgggagccgtaggattttccccattggataagaccattgcttcaatgccagttttataatctttaattcataattctctaccaaatgcccaacgattcctgacttaatgttggcgttggatgttattaagtaacttaaactctgccaacccagtgctttgctcttggcatcttgtccttggccaccaagcattcccattaagttggatttatctggttgatatgacaagatcacaattgctttgctttggagtggtgaaaagagatcttaggttggcagttatctctcaatcaaggcttgaaatgttgagtgttaagaggaagttatgggggcaaagggctgaaagaaaaagggctattctgttatcagcatcttaacttgcttttggaccagagtctggcttttaggagctgtgctgaattgcaacgcagtcagtgttctggaaacgccccaaagtcaaccaaggattgaagggaatcacaagcagtgcttcttttttattttttttttgagatggagtctcactctgttgcccaggctggagtacagtggctcgatctcggctcactgcaagctccgcctcccgggttcatgccattctcctgcctcagcctcttgagtagctgggactgcaggcacccgccaccacacccggctaattttttttgtatttttagtggagacagggtttcaccctgttagccaggatggtcttgatctcctgacctcatgatccacctgcctcagcctcccaaagtgctgggattacaggcgtgagccaccacgcccgcccaagcagtgcttcttacttgccgggttctttctccacatccccactggaagtctggggactgccactgagctcttgagtctgatgcacgataatgagtttttcttcccaacacctgagctgatgctgtagccaaaaaccaggtcccctcaagaggatcctactgaaacattagctcccttgcagatttttttttttttttttttttgagatggagtctcgctctgttgcccaggctggagtgcaatggcatgatctcagctcactacaagctccgcctcctcggttcacaccattctcctgcctcagcctcccgactagctgggactacagtcgcccgccaccacgcccagctgatttttttgtattttttagtagaggcggggtttcaccatgttagccaggatggtctcgacctcctgacctcgtgatccacctgcctcggcctcccaaagtactgggattccgggcgtgagccaccgcgcccagccctcccttgcagatttttctggaaactcttgcttacttgtgaaataagggtgcagtgccctttggcattaggttggtggaccctcgcttctcgtggcccagagtgggttttgtttcaagccccatgttagtgggaatcaccctcccttttccccttgccctgtgctgttgtggcacactggctgtggaggcacatgatatcactgatgtcttggccctctgacagaagaaataaagatacgcttcctttttttccctggttgcactgaaagaaaccccatcagttgtctgaagggtatatactgcctagaattccacttatgtgagagagactgtcggcgggattgcccatctgttgactgggtactttggccatctgggtacctggcacttggaaggtgccccgggccctgcagataggggcacctatagatttcctgaaagggcagagagagtgttttcaatagcagttcttggttgtcttaccttccatgtgtgcacaatttaagttgtgggttagaaaagggatgactggtctgtttctcattgaaatgattccatgcagtggccatcattcttttctttttgggggtctagtatcagtaagctctgagaccaaaggttcttatatttgaatgttaataaacaaaacaaggtagggtcatgggtgggtgagaaacaaagagaaacttctctgatgacttggcagtggttgggtttctggagcccatcgagattccctggggaaacgttggctgctgtgcattattaaggaggttgctgttacttccgaggacttctgaacgttttccagtcttttccttttgcaagttggtagggggtatcatggggtggcggtttaatttgccttccttagcaagtaggtgaagaacctggaagcagctgctgttgccacaaaggggaagaacagccctgagattcttttgcttgtgtttgacaggtgatggagtgaagtcgggatccttagcaaagtcctccctggccagctaagctcagtgggcagtacgagttttccccttgtttagagacaaagggtttgcttttggcattttgatgttgcaatgcttggatacgctcttcccaggagtagatcttgctcttggatgatagtggtaatttttttttttttttttcctgagatggagtttcacccttattgcccaggctagagtgcaatggcacaatctcggctcactgcagcctctgcctcctgggttcaagcgattctcctgcctcagtctcccaagtagctgggattacaggcgtgcatcaccatgcccagctaatttttgtatttttagtagagacagggtttcaccatgttcgtcaggctggtcttgaactcctgacctcaggtgatctgcctttcttggcctcccaaagtgttgggattacagacgtgagccactgcatccagctgataatggtaattgttgacttaactttttcagatctcagtataccatgggtttctcttccatattagtagtcctcatttgcttttctgaaatctacaggtcaccaccctgggagtcttgatgatgcttggagccatcaaaacctcacccctcccaggtttgccaatacagactgctgtcatgcacaaggtccatattgatacaaggcagatcataccttgaaggtctctgtctgctagtaacatgatcttctgcagaaacaaacttgaccttaggctttacaaaaagtaactcttacgttagagcccatagttgcatggaacgctcaattatttttggcacaggcataaacgctgtaatttcctgacttcttttggataacatctagatgggggaaatgggtagaagaaaagcacggaaaccaaatagaattgaaaggcataattccagggtcctgtccaaggaatgtttacgaggtcaagtccgtgtgtgtgtgtgtgtgtgtgtgtgtgtttcaagacacatgtggtgttactgtggcttctcaacgttttccaggaagatctcggccttcaggagtgacactccctacgagaatgtgaacgtgggtgagttgaagaggacaccttggcatctggcctttgctgaggctggaaagcatttgggacttcacagttgttgtgggttgaatgctgcccccaaaagatttgttcaagtcctaaattcccagtacctcagaatgtgaccttaattggaaatagggttggtgcaggtaatttgagccaaggtcctactggagtagagtaggccttaatccagtaagacatgttcatataagaagagaataagcctgggtgcggtggcttatgcctgtaattccagcaatttaggaggccgaggtgggcgtatcacctgaggtcaggagttcaagaccaacccggctaacatggtgaaaccacgtctctactcaaaatacaaaaattagctgggcgtgatggtgagtgcctaatcttagctacttgggaggctgaggtgggagaatcacttgaacccaggaggtggaggttgcagtgagctgagatcgtgccattgcactccagcctgggtgacagagtgagactctatcagaagatgctgggcgtggtggctcacgcctttaatgccagcactttgggaggctgaggtgggtggatcacctgaggtcaggagttctttcagacagcctgaccagcatggagaaaccctgtctctactaaaaatacaaaattagccgggcgtggtggtgcacgcctgtaatcccagctacttgggaggctgaggcaggagaatcacttgaacccgggaggcggaggttgtgcgaagattgtgccattgcactccagcctgggcaacaagagtgaaattccaactcaaaaaataataataataaataagccgggtgcggtggctcacgcctgtaatcccagcactttgggaggctgaggcaggcggatcatgaggtcaggagatcaagatcatcttggctaactcagtgaatccctgtctctactaaaaatacaaaaaaattagccgggagtggtggcgggtgcctgtagtcccagctacttgggaggctgaggcaggagaatggcgtgaccccgggaggcggagcttgcagtgaaccgagattgcaccactgcactccagcctgggcaacagagcgagactccatctcaaaaaaaaaaaaaaaaaaaaagacgacacagatgggataatgctatgtgacaggggaagtggagagtagggggatgtggctaaaaaccacggaacattaaggattgccagctaccaccagaagctggaagaagcaaggaaggattctcccctccagatttcagaaggagcacggccctgctgagatttggattttggatttctagtctctagagctgtgagacaataaatccatatctgcttttttaatgagacagggtcttgctgtgtcaccccggctggagtacagaagtataatcctagctcaatgtagcctcgacctcccaggctcaagggatcctcccacttcagcctcccaagtagctgggaccacaagtgtgcaccaccatgcctggctaattttaaaattttgtgtacagacagcatttctccctattgctcaagctggttttgaactcctgggctcaagtgatccacctgcctctgcctcccgaagtgctgggattacaggcatgagccaccgcgcccggtctgcttgtttcttttaactgggttcttcaaggtatcccctccaaacagtgactaaacctatcaggtcaccagaagtgtgtggaaggattaatattgatgcccttgtgtggcctttgacttactgaatcaggaactctgggtttaggatccaggaatctgtattttattaaaaacagacttggtgatcttgaccatgagctgagtttagggaccactgccttccatcttctagttcaaaaatgttattgagtcacatccattctggagaggggtgtaacttgctctgtgtccccagcatcctctccaggggatgtcctcctgctcttgggctcctactgcacccagagggcaccaagcagttgggacactgtggttcaaggccagcctggaaagatagggagactgtctctacaaaaagataaaaatgaaaaaaattagggttggtggtgcttgcctgtagccctagccacttaggaggctgaggtgaaaggatcccttgagcccaggaggttgaggctgcagtaagctgtgatggtgccactgcactccagcctgggtaacagagcgagaccctatcccaaaaacaaacagtctgggccgggcgcggtggctgacgcctgtaatcccagcactttggaaggccgaggcgggcggatcacgaggtcaggagatcgagaccgttctggctaacacagtgaaaccccgtctctactaaaaaaaaaaaaaattacaaaaattagccgggtgttgtggcgggcgcctgtagtcccagctactcaggaggctgaggcaggagaatggcctgaacccgggaggcggaacttgcagtgagccgagatcgcgccaccgcactccagcctgggcgacagagcgagactccatctcaaaacaaacaaacagaaaaaagcaacaaaacaaaacaaacagtctggcttcttcagtagaccctgaggtcatgagggccagagctatgtctgtcttgtgctttagggtctctccacgcactagctcaatgcccagtaagcacccacattgaatcatacggctgagcctgggctatggggtggggtctatgggcagttccttttccagagcctcttcagggctcagggccatgtgtggattggggccggcccaccagaaagaatttcacctcggcctccccaggtgctgggattacaggccttaactcctgcaccctgccccttcatgtatttttaggctgctatcctgcttccttcaaacctcccatcttttccaaacttaggatctccaggtctctcagtgagtccctctgtgccttggtttctagaatctgttcttaacaaatggttagagaaaataaaaataaatgttccaggtgagaacacacacacaaacttgagccaaagccggaagatgagagggcatgcagtgcagatacttaaggagggaatcccagagagggaggagcatgtgcaaaggccctgaggtgggggtgtgctgggattttcatgggagagcagaaaggaccctgtggctggagtggggagggtggggtgaacagcagatgtagggaggacgcagactctggatcttacccccggggacatggggaagccagtggggtttgggccacagaaacttccgaatcttgtgttttgaagggagcactcagccactggctgctgaatagactgggttgtgtgtgtgtaattccagctccgtccatttctctcgagcactgagcacaactttctctgtacttcttcactttggaggggcaaggaggggtgaagtcttgctggttgtgtttccatttattcaacaaatgtttattgaatacctcctggaggctgggctgtgttctaagcatgggggcataggtgtgaactgggtagagtctggccctgctggcagggagcttggtctagtggtggagccagacgataaagagcattttattttatttattgagacggggtctcgctctgttgcccaggctggagtgcaatggcgtgatcttagctcactgcaacctctgcctcccgggttcaagtgattctcctgcctcagcctcccgagtagctgggattaaaggcgcctgctaccatgcctggctaatattttgtatttttggtagagacggggtttcaccatattggccaggatgggtctcgaactctttacctcaggtgatccacccgccttggcctcccaaagtgctgggattacaggcgtgagccactgtgcctggtccccaaagagcattttagatagcaatagtgcttggaagaaaataaaacaggtagtgaccagggcagctcatttcagacaggtgcagtcattgcagcttcgtggaagaggtgacatctgagctgagccttgactgatgcaaaggtctgcctgaacctactgtgtgtgtgctttttagccaaattcctattgacctatgaagattatacatctaaacctcaggggttacctcagccctcctgttggaacagctacagtttcacctcccctgtccaaggcatgctggcacccaggaaggcaagaaggaattgaggctgtgtgacacctggacctaacacctttgaggctgttatgagaccacattacaagatcccttatgttaaaccctgcctaggtcagtgacatggaaccgatgttggtttaggtttcttgagacagggtcttgctctgtcactgagactggagtgccacggtgcaatcttggctcactgcagcctcgacctcctgggcacaagtgatcctcctgcctcatcctcctgagtagctgggactgcaggcatgcaccgttacatctgggctaattttgcttattttttatagatgagtttcactacgttgcccaggctggtcttcacctcctgggctcaagtcatcctcccgccttgacctcccaaagagttgagattacaggcatgaggcaccacaccggactccattaggtttttaaagctttttgtagaaagtgatgctgaaagaaagaagtgggtattccatgtcctggtacctctggctgccagagggaaggaatgagagctatttcttgccatcttcctgtgctgtctttggtagttctctcccagggacatgtctttccctcagtgtttgatgcgatgggatgcctgtggccactgtgacgcggggatcagctgctagagtaggtcctgctgcacatcaggactcacactacttgtggctcatggtccccaaggaacctgcttccttagggaagatgaggatttgatatgacaataatgataatcattatcatcatcataccataatagcttccatcaacagagaatttactgtgtgtcaagagttttattttttgaaaaaaaaaaattgtaggtattactggctggacatggtggctcacacctgtaatcccagcactttgggaggctgaggtggagttcaggcctcctcacttgagcctaggagttcaagaccagcctgggcaacataacaagaccccatctctataaaaaattaaaaaattaaaaaattagcttggcatggtggcgcctgcctgtagtcccagctactttggaggctgaggtgggaggatggcttgagcccgggagttgaggctgtagtgagttatgatcgtgccgctgcattccagcttgtgtgacagagattgaccctgtctctaaaataaataaaaattaaaaattgtaggtattatgttcttagggctccaaattcacaaggagccactgaaaagtcttccactgccccagcgtcccagctgcattctcccgaggcaactgtttctggttccttgtgtctcctctcagagacattttatgaaaatgtaacaacatatgtatttttcttttttttttttccacaaatggtagcatatggtatatattttacactatgctttttttttttggaggggacagggtctctcactctgtcgcccaggctggcatgcggtggtacaatctctgctcactgcaacctccgcctcccaggctcaaatgatcctccgacctcagcctcccgagaagctgggactacaggcagatgccaccacgcccagctaactattttatgttttgtagagatggggtttctccatgttgcccaggctgctcttgaactcctgagctcacggcctcccaaagtgctgggattaaaggcatgagccaccgcccgcctggcctacactgtgcttttttacttaatgtatttttaaaagtcattttaggaggtttaaaaaagtcagtgatggccaggcgcggtggctcccgcctgtaattctagcacgttggtgggtggaggcgggcacattgcctgagctcaggagtttgagaccagcccgggcaacgaggagaaaccctgtctctactaaaatacaaaaagttagccgggtgtggtggcaggtacctgtagtcccagctacttgggaggctgaggcaggagaatcgcttgaacctgggaggtggaggttgcagtgagccaaaatcgcgccactgccctccagcctgagcgcaagagcgagactctgtctcaaaaaagcccccaaaaacctagtaataataggttttatttactgaaggtttactatctgctaggcattgtgccactttaaatcatgaggtatgttgtaaacatgatctatagtgacatatattgtatatgtagtgatatgtactgtatatgtcatatagtgtcatgtgacatactgtatatacatacactgatagatgttatttatgtgatgtccattgtaaacatgacatatagtacttttgtttaccgggtgcttactaactgctgtaccctccgtgggcattcttccatccagttggcccattgtcaattccttgctcatccatccactcttcctacacaagacccatctctaagaaaaatattttcaaaaattagccgggctgggtgcagttgctcacacctgtaatcacagcacttttggaggctgaggtgggtggatcacttgagccaggagttcaagaccagcccaagcaacatggcaaaaccccgtctctaccaaaaatacaaaaattagctgggcatggtggtgagcacctgtaatcccagctactcagggggctgaggcaggaggattgcttgaacctgggaggcaaaggttgcagtgagccgagattgtgccactggactccagcctgagtgacagagaaaggaaaagctttaaaaacctaacggatatgggtacggtcttaaaaaaaaaaaagaaaaaaaattagccggatgtgatggggcatgactactacagccccagctactcaggaggctgaggtgggaggatcgcttgagcccaagagttggaggctgcagtgagttatgatcaccacactgtactccagcctgggcaacagagcaagactatctctaaaaataaaaattaaaaataaagaaaaaagaggcctggtgtggtgatgcctgtaatcgcagcactttgagaggccgaggtgggtggatcacctgaggtcaagggttcgagaccagcctgggctgggctgggctgggctggtctggcatggtggctcatgcctgtgatcccagcactttgggaggccgaggtgggcggatcatgaggtcaggaatttgagaccagcctgaccaacatggtgaaaccccgtctctactaaaaatacaaaaactagctgagtgtggtgacacgctcctgtaatcccagctactcaggaggctgaggtagaagagtcgcttgaacccgggaggcggaggttgaagtgagccgacattgtgccactgtactccagcctgggtgacagagcaggactctgtctcaaaaacaaaaacaaaacaaaacaaaaaacccaacaaattagttgggcatggtggtgcacacctgtataatcttagctacttaagaagctgagacaggagaatcacttgaactgggaggtggaggttgcgcagtgagctgagatcgtgccactatactcctgggtgacaacagcaagactctgtctcaaaaaaagaaagaaaagaaaaagacaatggtaaaaaaaaaaaaaaaaaaaaagaataaatacacaatttagtgtttttgtcttgttttgttttgagacagagtcttactgtagcacgcaggctggcatttcatgatgtgatcacagctcactgcagccttgacctcttgggttcaagtaatcttcctgcctcagcctcctgagcacctggggctacaggcgtgcaccgttacacccactaattgtttgatttttttgtatcagggtatctccctgtattgcccaggttggtttcaaactcttgagctcaaggaatcctcctgcccctgcctcccgaagtgctgggattacaggtgtgagcaatcacggccagccacaatttagtgttttatgaaaccatcaccatagtcaacataatgggcacacccgttgccccgaaatatagttcccttgtgttcttttatcatccttccttctacccctcctcacaactctgcccccagccaactactgacctgcttcctgccactttggattcatttgcgttcgtagaattgtacataaatagaagcatacagaaaaagagataatgcattatttttattttgtcggctgctttcactcagcacaatgcagttgagatctccatgctgttgcttgtatctgaagtttgttctttttattggcaagcactactccgttgtacagctatgcagctatgccacaatttgtttatctaatccccagttgatagacatttgggttgtctccagttctccagttgttgtcttttacaaatacagctgctgagaattcctgtgtgcatctctgtgtagatgtgctttcttcttcttcttctttttttttttttttgagatggagtctcgctctgtcgcccaggctggagtgcaatgttgcaatcttggctcactgcacgctccacctcccgggttcacgccattctcctgcctcagcctcccgagtagctgggactacaggtgcccgccaccatgccctgctaattttttgcatttttttttcagtagagacggggtttcaccatgttagccaggatggtctcgatctcccgacctcgtgatccacccgcctcggcctcccaaagtgctgggattacagtcgtgagccaccgcacctggccttttttttttcttttttgagacagagtcttgttctgtcgcccaggctggagtgcaatggcgggatcgtggctcactgcaacctccgcctcagcaattttcctgcctcagcctcctgagtagctgggattacaggcatgcaccaccacacctggctaatttctgtatttttagtagagacagggtttcaccatgttggccaggctggtctcaaactcctgacctcaggtgatccccctgccttggcttcccaaagtgctgggattacaggcatgaaccaccgtacctggcccttttttttttttgaggagtcttgctctgttgcccaggctagagtgcagtggtgcaatcttggctcactgcaacctctacctcctaggcccaagtgattctcctgcctcaacctcctgagtagctgggattacaggtcctgccaccacgcctggctaatttttgtatttttcttagagatgaggtttcaccaggttgaccaggctggcctcaaactcctgacctcaagtgatccgcctgccttagtctcccaaagtgctgggattacaggtatgagccaccatgcccggcctttttatttttttttcctttttgagacagggtctccctctgccacccaggctggaatccagtgatgtgatcgtggctcactgcagcctctccctcctgggctcaagcaatcctcccacctcagctcccgagtagctgggagtacaggtgcgcaccaccatgcctggctaattttttatttttatttttatagagacagggtctcactatgttgcccaggctggtcttgaactcctggtctcaagtgatccttctgactcagcctcccaaagcactgggattacaggagtaagccgccacgcctagcattctttcctctgttctggggaaatacctcagagtgggatgtgaatcaagtgttctgtggttggcatttttatctcctgcctttttttccacccagggagcttgggttgtggatggggaaatagaaagggaatagttgggttaccatctttctttccccacagtctgaaattcatcttgttgccttggggattttgatgtggttctggatcccgggaaccagcctctccctttttcttgttccttctcttctcacccttgccaggttgaggttgatgagaatcaactttcactttggcatcaaagaacccggcctggggttaagccttggctctgtcacttcacagcttcatgactgggcgagtctgcacctctcactgctgcacatttatctctgcttatttttttttttttctgagtttatggataacatggcacctacctaccttgcaaagttttttgtttgtttgttttgagacagagtctctctctgtcacccaggctagggtgtagtggcacaatctcggaagttcagtggtgcgatctcagctcactgcaatctctgtcttccgggttcaagtgattctcctgcctcagcctcctgagtagctgggactacaggcatccgccaccacacctggctaatttttgtattttcagtggagaaggggatttcgccatgttggtcaggctggtctcaaactcctgacctcaggtgatccgcctgcctcggcctcccaaagtgctggcattacaggtgtgagccaccacacctggccccttgcaaagttattgagaggatcaaataataagagggcggaaaggggagacggtgtggtgtctgaggaagaaaacaaaaggaatcgaataaaagcaaaaggatttgttttaggcagaacaatgataacaattgctccttggttgatggagaggtgggtcacagtctgcatcacccttggcgcccttggaaacttaggtaggtctggcattttctatcagttgggtctgcgaggaccacctgctggtccttggcggggctcatgagagtgagatggagaaggtgaaaggacccagcaaactagagtgtcaggtggcctctgtgtgtggctttcagtcgtcatcagtctgtggctccctcatttggacctcttgagagcccagattggaggcatcagccattgctgctggccccacatccagatcacactgagtgcaactgtctcctcctccccacacacacacatcgtcttcctctacgtcaccggcatctcccgtctggccatatcccaatgtatatggcctttcccatcaggcagcctgagggatcctgttgaaatggagccaggatttgtcatgccactgcctaacaccatgcaatcatgtctcattctgctcggaagaaagttccagtctccttacctggcctacttacaagtggtcccctgtccattccacgccagccttgcatcttgctgccaatagtggaatcatgcttggtcctgtctcagaatcttgcatctgctgtccccctgcctcaaagattctttctggaagcccctgtgcctaactcttcctgcagctctgagctggaacacagcccctcagagaccctccgggctacagcagctcccaagttgctctctcctatcttcactgcagagaccaggatctggaatggtctgcctcagcttttgacatttgtatgggctgttcctggactagagtgtaagctccatgtggggtgccctatgtcaccagcatgtcaacaagatccagaaccaagggtggcaagctattcttgtaaagggccagatggtaaatatttgaggctttgggctgggcatggtggctcaggcctgtaatcccagcactttgggaggctgaggcagaaggaatgcttgagtccaggagttcaagactggcctgggcaacatgatgagaccccatctctcaaaaaaaaaaaaaaaaaaaaaaaaattagttgagtgtggtggtgcatgcctgtagtcctagctactttggaggctgaagtgggaggactgggaagaggaggttacagtgaactgtgatcacaccaccgaactttagcctgggtgacaaagcatgaacctgtctcaaaaagatacatatgtagctggggacagtgtctcatgcctgtaatcccaacactttcggaggccgaggcaggtggatcactggaggtaaggagtttgagaccatcctggccaacatggtgaaaccctgtctctactaaaaatataaaaattagccaggtgtggtggcaggcacctgtaaccccagctactcaggaggctgaggcaggagaatttcttgaacccaggaggtggaggttgcagtgagctgagatcacaccattgcactccagcctgggtgacagtgagtctgtctcaaaaaaaaaaaatgtatatatatatatttgcagcttttagaggccaggtggtctagtgcaaccttagaccatatgcaaaaaaatgggcatggctgtacccagtaaaactttatccacagatgctaagaatgtaaatttcacataattttcacctgtcatgaaatagtcttgcaatgttttttcaaccattaaaaaatgcatcacgcctttaaatcccagcactttgggaggccaaggtaggacaatcacttgagcccaggtggtcaagaccagcctgggcaacatagtaagaccttgtctacaaaaagtaaacaaaataagctgggtatagtggtgcatgcctgtagtctcaggtactttggaggctgaggaggaaggatcactcgagctgaggagtgtgaggctggaataaactatgatcatgccactgcactccagcctgagcgacaaagtgagacccacttttaaaaaaaggaaaaaataagagtaaaaaccattctcagcttgtgagctgtgcaaaacacaggtgatgggccaaataaggtttgctaacccctggcctaagttacttctggttaatgagacaataaaaaaacctgccccatggtgagatcacaggttaaaaacatttttggtggggacagggggatatttgaatctctgtagagcgtgctgtgaaaataactcacacagtctcatccacagacgggtgacagatcaagctttctggcccctggcctagagtactacttggcacagagtggttgctaagtaattaataaaacaattgcaagaataaatgaaatttgagcatgataggaaatgttagtcccattttaggtgcaaatacaaaagcgtagagctgcaaagggacttaggatcttgaacattcccaagtcagacacggctgagtttgagggatgaggtcgagagctcatctgcctctccaggcagctgggctggctggtggaggtgggactcagtcacttcctagctgtgtggctttaggcaagtttcttcacttttctgagccaattgcctcgtgcctaaactgaggatcttagtcatccccctgtgaggatgttgggaagacagatgagatggcggtggctacagagcatgcagcatctggccggctgctggtgggtgccctgcacatagtagctgctagtattattaacccgtctcttgccagaaggatttgcaaggtatcaggagaattgttgtgccttaaatggctcaggaaactggcagttgggctgagagctggccttgctcttatttagtgccaatgccctgcccacccctgccagcatctgtcctgagttaggggacctcaccagcatcctctctatcagtagctgcagtttactctgatgcactgggatcagctccagactgcgagttccctctccctccctcagccctgtaatgacatggttggaggccattattttacagaaaactcttagaacttacagagtcttttacaagaccaaattgatgcccaactgaaggatcctgtaggtgctaaggtttcaaatctgggacttaccttctaagccttcattaagtcatttcattaataatcacctggcaagggcttgttttagggcatccaggcttctaggctggtcagtggaagagcagataagcctccaagaagctccccagaccttcctcctagtcagggaagccaaagacatcaggcaggagggaagtttctggcatgctaagtaccacgatgcaaataaaatgaggttttgcgatggggaggcggtggcgaaagagatggcagggagtcccttagcgagagtggtcagggaaggcttctcaaaagagggggcattttttttaagccctgaataatgggagtgagccagccataagtgggccgggaggaaagatgctcaggaatagagacaaggccagaattatagcaaggcatgagaggtggggaagcccaggagacacagtgtgctcagagtcaacgcatgaggcttagattttattctagttgacgtttggttttaagcaaggaaaaaataaaatctaacttggcttttaaacagacaattccctctgctgtgggagaaataggttagtgtggaggcagggaggccagtttacgaggctccggtagtgatccaaggaggttggggggtaggctggagtggcagaggggagccgggtgccagcatgttttgcggatggacctgatggaacttgctgccaggtggacgggagacacctctagcacttttcaagcggttgtaaactatttatagcagcttctggcactcggcagttctcctgggtcttggtgatgacagagggagagccgccaatttatgttccttcagtcaggatggctggccagcctctttggtcaaatgccttggaggaggatatggtggggccgatggatttcttccaaaatgaagatggtgataatggcagcaaggaactgtgtcattactctgttcataggccccagtcctcttcccaccaattcacctctttctcttctatctccccttgggagaagggtgggggttggggggtgggggcagtttacccacagcttgacccaattgttcctatttcatgaaccaggaggaagtcaacttttgagcatgagggctctgagagaggatggaatttccccctagatgacatttggcaatgtcataactttggtgaggggtggaggttgggggctgcaactattaagtaatagggagatgctacccatccacccatgcacaggacatctccccacaacaaagaattatccaacctcaaatgtcagtccagaggttgagaaatgctgtcacaaacacagaaaaaaatctggaggcttttttttttttttttgagacagagtctgactctgtcacccaggctggagtgcagtggtgcaatctcggcttactgcaacctccacctcccgagttcaagtgattctcttggcgcagcctccccagtagctgggactacaggtgcacaccaccacgcccagctaattttttttttttttttttttttgagacaaagtctcgctctgtcacctgggctggagtacagtggcatgatttcggcttattgcaacctccgccttcgggattcaaatgattatcctgcctcagcctcccaagtaactgggattataggcgagcaccaccatgcctggctaatttttttgtatttttagtagagacggtgtttcaccatgttggccaggctggtctccaactcctaacctcaagtgatccacccgcctcagcctcccaaagtgctgggattacaggtgtgagccactgcacccggactttttctttttctttttttttttttttttttgagatggagtctcactctgttgctcaggctggagtgcagtggcatgatctccactcactgcaacctccagttcctgggttcaagcgattctcttatctcagcctcccgagtatctgggattatagttgcctgccaccacgcctggctaatttttgtatttttagtagagatgggttttcgccatgttggccaggccagtctcaaactcttgacttcaggtgatccacccacctcagcctcctgaagtgttaggattacaggtgtgagtcactgtgcctggccccatgaacagaattgactttgcatggtggattaccacatcactttttactgatattattttatatagcctaagaatttaaaaaacaaatacatgttactttcataattaaaaaaagaattcacgtaatgtttatataatgaataaaggtagcctgtgcaaagattctgggagaggaaaacagctgcaccctgatgcaattttttttttttttttttgagatggagtcttgctctgttgcccaggctggactacagtggcgccattttggctcactgcaacctccgcctcccaggttcaagcgattctcctgcctcagcctcccaagtagctgggattacaggtgtccaccaccacacctggctaatttttgtatttttagtagagacggggtttcaccatgttagccaagctggtctcaaactcctgacctcaggtaatccgtatgccttagcctcccaaagtgctgggattacaggtgtgagccatcgccggccgcaattgttttgtaagtttggatttggtgctgtggtttctcacgtgaggcaattttccatagggtttttcagcttgatttccatccgatcaatgttgcagtagattcaggtaaacttgcaggagttcctgtatttcttccctttacttttccagctgggagataaaaggagaaagggaggggccttgtgaggtgaagggtgtccttatacaggtgtgacagcccctggcccagagcctcctcccatccctgctcttgtcctcagcccacttggagggaaccgccccttccccacagcacccaccgcactctgagccatggggggcttcattctctcctgtttcttttcttcttaggcccaggaatactaattttctgcaagcagaagacactattctaccgctaatatccatgagtagtcttctcccacaagacagaaaaaaaattcagtggtggaaagcaccaaccatttaagaaaatcttcaagaaggcagaattttctcaactctttctttttaatttattgttttttctatttgttgatgctaactaattctagccaatgacagaatgacttaaggtgtcacaatatcatttaattgttttactttttaacatgtttatttgttttttttttttcaaggtagagtctcgctctgtcacccaggctggagtgcagtggtgcaatctcggctcactgcaacctccgcctcctgggttcaagtaattcttgtgcctcagcctcctgagttcctgggattacaggcaagcaccaccacacctggctgtatttttagtagagatggggtttcaccatgttggccaggctggtcttgaactcctgagcaaaaagtaatcctcccacctccgccttccaaagtgctgggattacaggagtgagccaccgtgcctggccaatgtctttatttttgacaaaagtactgcaggtaggccgggcgtggtggctcaagcctgtaatcccagcactttgggaggctgaggcgggcggatcacaaggtcaggagattgagaccatcctggctaacacggtgaaaccccatctctactaaaaaataaaaaaatacaaaagattagcccggcatgctagtgcacacctgtaatcctagctactcgggaggctaaggtggagaaatgcttgagcccaggaggcggaggttgcagtgagctgagatcgcgccactgcactccagcctgggcgacagagtgagactcagtctcaaaaaaaaaaaaagtactgcaggtaacatgcctatttctacttacaatatctttaaggaggctagacaatcacccactaagaggttacctccggggcgggaatgtgggactgagactgggggcagagggtcatggatgacaggcaggctgacctttcactttgtctcttttacttttttaaattaaatttattttttttacatattttgagatggagtctcactgtgttgcccaggctggtctcaaactcctgggttcaagcaatcctcccaccttggcctcccaaagtgctgagatgacacacgggagccaccaggccgggactcaccgtgtatcatttcatccgctttgaaggttttaatcgtgtgtggtcaaaatgaaacctgctttcaaacctagagaaatcaggtagagttaaaacactaaaaaataaccatcagtgctattacaagagaatctacagaagaacagaaaacatacctgcattatgtcatttaattctcccagtaaccctatgttagcccatttcacagatgaggcactggaggcttggccagaggtcagcgagttgtcgaagctcatccagctggtatagggcagagtcagcttcaagagtagacctggctacttccaggggtcgtgtttaaacagtgagctcaatgccagctataagctatgatgcctgccataagctatggtgccctcgaatggaagagcttacattcttgagcacttggcatgtgccagccactgttatagacattttttttttttctgagacagagtcgtgctctgtcactcaggctggagtgcagtggcatgatcttggctcactgcaacctgtgccttctgggttcaagcaattccctgcctcagcctcccgagtagctgggattacaggtacctgccaccacacctggctaatttttgtattttcagtagagatgggggtttcaccatcttggccaggctggtcttgaactcctgacctcgtgatctgcctgcctcggcctcccaaatgctgggattacaggtgtgagccaccgcgcctggccgaatgaatctttttaagaaaaaaaagtttttaaatttatttattttgtatttattaatttttttagttggagtctttctctgtcacccaggctgggcgacagagcaagactctgtctcaaaaaacaaacaaacaaacaaagaaacaaatgcagcaaatggcaccacggagaggagtgcgtttccctcccacacttgcccccaggccacccgcttccctggctggagacaaacctcattatcaattaggtgtgtgcaaagctattttaggcacatacacacaactgcatgtatttacttttttaacccaaatagcggcgtatggtacacaccacctggcacctcactctcttcactggagttttcacgtggatggctcctttccattcaaatagagctgacttgttttgaaggtgtcctcggctgtgtgtctggagggtgacacacatataactcatcttttccttacagggtttgtgatgtttcttgtcccctgctgttataaaggagctgctgggctgggcgcagtggctcatgcctgtaatcccaacactttaggaggctgagatgggtggataatttgtggtcaggagttcaagaccagcctggccaacatggtgaaaccccatctgtgctaaaaatacaaaaactagccaggcgtggtggcaggcgcctgtaatcccagctacctcgagaggctgaggcaggagaattgcttgaacccaggagtgggaggttgcagcgagctgagattgctccactgcactccagcctgggagacagagcgagactctgtctcataaataaataaataaataagctggttgggcatggtggctcacacctgtaatcccagcactttgggaggcagaggcagggagatcacctgaggtcaggagttcaacaccagcctggccaacatggcaaaaccttatctctattaaaaaatacagaaattagccgggtgtggtggcagatgcctgtaatcccaactactcgggaggctgaagcagggggaattgcttgaaactggcaggcagaggttgcagtgagctgagattgcaacactgcactccagcatgggtgacagagtgaaactccatctcaataaataaataaataaataaataaataaataaataaataaatggagctgcttgctcaggtggttggtttcacagagtaccttatggatggacccctaaaagccaaattgcatttcactttagtgaatgaaccccactgtgttgccctcatcctggggccctgttcacaccctcgtgtgcatgaatgggcctgctggaagtgctgctttctttctttttttgagacagagtctgttacccagacaagagtggagtgcagtggctcaatcatagctcactgcagcctcaaccacccaggctcaagtgatccccccacctcagcctcccgagtagctgggaccacaggcgtgcaccaccacgcctagctaatttttttattttttatttttttgtagagatggggtcttgctgtattgcccaggccgatcttgacttcctgggctcaagtgatctgcctagctcagcctcccaaagtgttgggattatgggcgtgcgccaccgtgcctggttgaggtgctgctttccacgggtgttcagggagttctctccaggagacaacacctgggctggtggctgagcagagcccttggtgcagagctggtgacagaagggctatcaaggacaagttcagggagcagaaggcctggaggctggaggaagagtagactgggatggggccggagggagttggagtcttctgggccctacaacgggattgaaattctactcttgatgttgtaggaagccattgcagagttacaagcagggagagacatgactggcgttcatattcatttatgtgttatttttatttctgtggagatggagtctcactctgtcacctaggctggagtgcagtggtgcaatctcggctcactgcaacctctgtctcccgggttcaagtgattcttgtgcctcagcctcccaagtagctgggattacaggctcaggtcaccatgcgctgctaatttttgtatttttagtagagacggggtttcgccatgttggccaggctggtctcaaactcctgatgtcaggtgatctgcccacctcggtctcccaaagtgctaggattacaggcgtgagccaccacgcctggccatggctttcattttaaaaaaccactttgcatggagaatgaaccactgtgggtaagagtggaagccgggagcctggtaggaagccacacaggcgctgaggcaagagatggtggctcattggctggtaggagccatgatggagggccagaaagacctgggaagtattttgaaggcggagctgacagaacttgctgatgagttggatgggctcaggagcagggtgaggaatcaagaggggatgatgtaaaactcccaggattgggcctcagcaaagtttaccaagtcagaaaaggctcaataaaccagctgtgtgcaagtaagaccatgcagggaggcctagggaaggaaatttccatgggagatgctcttggtgtcatttagatgggtcccaagttgttcaggcagggccctgtggctggtgcttccctggagctggcctgtcttggagctccaaagcctacgatggatgggttttatggtggctctgaagactgggacctccacttgcccctgacacaccaggacaggggatgggggaagctgcattctgggtggggctggcattgtctagctcacaataaaaattcctcaagttaaagtaatcagaggaggtaggacagggctgtgcccaagggtgaggctcattagagctttattgactgtcaacattgacaggaaccttggaggtcattagccaagcagttgatttggggaaaaaaaagtttaaatggcaaattatgccatttaaataattatttaaaaggattaacataacaacagattttattttgttttttttttgagacagagtctcactctgttgcccaggctggagtgtagtggcacagtcttggctcactgcaacctccacctcctgggttcaaatgattcccctgcgtcagcctctcgagtagctgggattacaggcatgcaccaccatgcccagctaatttttatatttttagtagagacggggtttcaccatgttggtcaggctggtctcgaactcctgacctcaggtgatccgcccgcctcagcttcccaaagtgctaggattataggcgtgaaccacttgctcccagcccagatattgtttattaagcacttagtatgcaccagggtccaggccaaatgttttacatccattattactttttttttttttgagaccgagtctcactctgtcgcccaggctggagtgctgtggcatgatctcagctcactatgacctttgcctcttgggttcaagtgattctcctgcctcagcctcccaagtagctgggattacaagtgcctgctaccatgtctggctaatttttgtatttttagtagagacggggtttcattgtgttggccagactggtctcgaactcctgacctcaaattatccgcctgcctcaggctcccaaagtgttgggattacaggcacgagccaccgtgcccgaccattattacattttaatcctccaaataggcctccagggaagtactgtcatcatctgtctagtaactgcagttcaggagccccatggttccctagctgcgatggggtcccaacggccgccctctgactcctggaaatggaattggagcctccagggagagtttacaaaaatgagacccaaccagagggagtcactttgtgaccaagatactaaagacaaattaagaatcttgggtatgctgggcgtggtggctcacgcctataatcccagcactttgggaggccgaggtgggtggatcacgaggtcaggagattgacgccatcctggccaacatggtgaaaccccttctttactaaaaatacaaaaattagctgggcgtggtggtgcttgcctgtaatcccagctccttgggaggctgaggcaggagaatcacttgaacccaggaggcggaggttgcagtgagctgagattatgccgctgcactttagcctggtgttagagcgagactctgtctcaaaaaaaaaaaaggaaagaatcttagacatgtcactgacagcccaagaggggccttagttgaacagaactaaggcttttgttcatcccacacagcatgttggcccccagagacactgaccccagaagcccttccagcagccccacacaagggctgggtctccagctcttgccaagttagattaatatattcttaattttatcattctaaatcctttaaaaatttttcttaatttaatttttttttttttttttgagacagagtctccctctgttgcctaggctggagtgcagtggcgtgaactcagctcactgcaacctctacctccagggctcaggtgatcctcccaccttagcctcccaagtagctgggactacaggtgtgcaataccatgcctggctaatttttttgtagagatgggctttcatcatgttgccctgggtggtctcaaactcctgggctcaagcaatccacccacctcggcctcccaaagtgctgggattacaggcatgagccacagcacttggccagtattctgtttttgtttttgtttggaggcagagtctcactctgtcacccaggcttgtgtgcagtggtgcgatctcggctcactgcaacctctgcctcctgggttcaagtgatgctcctgcctcagcctcccgaataactgggactacaggcatgcatcaccacatccggctactttttttgtatttttttgtagagatggggtttcaccatgttggtcaggctggtctcgaactcctgacctcaaatgatccacctgcctcagcctcctaaagtgctgggaatacagacgtgagccactgcgcctggcctctggctagtattctgcattcttgacagtctgatagatggaaaaatatccctatggcaatgaatacactttaaaaacatacggaatgtcggtgggccactcttgccctctccccaactatctttagtggtgggcttcaggctccgggcaccctctattttgtttcctagcatgagtacattcatgtagtcattgaacacctctttaaactctgtgttcgcttcagcagcacatatactaacattggaacaatagagatcagtatgttccctgtgcaaggacgacatgcaaattcatgaagcgttccgtgtatttttaaaatttaatatattaaaaaaatttaaaactcaatagagtgtctgttgtgtgccagacactgttctgggtgctgaggacacagcagaaagagattggccctcaggcggttcatcctggtgaggacccagacagctcacacaacggacgtgtaaaatgcactgagtgttcccagggtgagaagtgctttggagaaaaaattaaaaggggcaggaatgtgcatttctggggcttcggaaagtttcatggaggggaggggaggggagggagcaagtgtagaagaaacagaagtctaggaaaagggtacaaagtgcaaaggcctggagatggggaccgtgcccaacagattggaggaacagctgggatagctgaggctgcaaagcagggactaggagggctgtgggacctcatggcccctgggaagaagtctgccttttgctccagatgaggtggggacctttgaaggttgggacaacagggatgagacctgacattttcaccaggatcactttggctactgtcttgtacattgactgtagggggtcaaggtcagaaactcaagacagttggaggctagagaaatcatcaaacaaaagatggtggtgagttggtgtgctgggttcaatagtttttctcccaaatttatgtccacctggtatctcagaatgtgaccttgtttggtcttagagtctttgcagatgtagctaaagatctcaagatgaaattatcctggacttaggacccaccctaaatgactgatatcctcataaaaaggggaagccacagaaagatacacagagagaggggatgtgaagacagagccagagatggcagtgatgcccaggaactggtgttcctggcagaagcaccagaagctggaagaagccaggaagggccctcccccagagccttcagagggaaagcagccccgcccatacctttatttcagacctctagcctccagaaccctgagtgaaaaagattctgttgttttaagccatcaattttggacaatttgttacagcagccccaggaaatgaatacacttgtgccaacacaagagtagaggagaaggtgaaaattggtccgtcagagttgggatatattttgtaggtaaagccaagaggatttgctgaaaaataggaacaagagaacaagaagagtccaggctggctccagggtttttgctctgggcatctggcaggctgactgggtatcagaagggctgtttgggactgggcatggtggctcacgcctataatcccaggactttgggaagctgaggctagagtttgagctcaggagttcgagaccagcctaggcaacataggctctacaaataatacaaaaattagccaggcatggtggtgagcgcctgtagtctcagctacttgggagtctcaggtgggaggatcccttgagcccaggaagtcaaggctgcagtgagccgtgattgagccactgcactccagcctgggcaacagagtgacagcctgtctcaaaaacaaaacacaaaaagcaaacaacaataacaaaagagctgtttatgaaagaagagaacatgctgccctttggataaattaagttgcctgtgagacatctaagtggaagccagctgtgcatacattttgtttgtttgcttaaggacatatcttaaaatctttccatgtcaacctataaagaaatgtctcattttttttgttgctgtgtatttcattatatgcataaaccatctttttttttttttttttttttttttttttttttttgagatggagtttcactcttgttgcccaggctggagtacaatggcatgatctcagctcactgaaacctctgcctcccaagttcaagcaattctcctgccttagcctcccaagtagctggtattacaggtgcctaccaccatgcccagctaatttttttgtatgtttagtagagacagagtttcaccatgttggccaggccggtctcgaactcttgacctcaggtgatccctccgcctccacctcccaaagtgctgggattacaggcttgagccactgtgcctggccaaaccatcttatttaaccagaattaggcacgtttccaaatgctaagctggatgagtctgtctgtgatagtttgttcttccactgaaatcagtacttactaatttttctttttttttgaggtggggtctcgttctgtcacccaggctggagtgtagtggcacaatcaatgctcactgtagcctcgacctgctgggctcaaatgatcctcctgccttatcttcctgagtagctgggaccacaggcacacaccaccattccctgctaattggtttttcatttttttgtagagatagggtctggctgtgttgcccaggctgttctcagactcctgagctcaagcaatcttcctgcctctgccttccaaagtgctgggattacaggtgtgagccactgcacctggccagtgcttgctaatttttgagcacttgctgtgtgcctgctcctgagaggaatggcctcacaaaggagacggtttagtgtggtggccacggtgttccagtttcagaccatcaccttctatgaaacagggctgcggccgggcgcggtggctatgcctgtaatcccaccactttaggaagctgaggagggtggatcacctgaggtcagtagttcaagaccagcctggccaacatggcaaaaacctatctctactaaaagtacaaaaattagccaggtgtggtggcacatacctgtaatcccagccactcaggaagctaatgcagaagaatcccttgaacctgagagacggaggttgcagtgagccaagattgcaccactgcactccagcctgggtgaaagagtgagactccgtctcaataaataaataaacacaaagaaaaataaaaatacaaaattggccaggcgtggtggcacatgcctataatcccagctacttgggaggctgaggcaggagaatcgcttgaacctgggagatgaaggttgcagtgagccaagattgcaccactgtactccagcctgggtgaaagagtgagactccgtctcaataaataaataaataaaaataaaaatacaaaattgaccaggcgtggtggtgcatgcgtgtaatcccagctacttgggagactgaggcaggagaatcgcttgaaccctggaggcagaggttgcagtgagctgagattgcgccactgcactccagcctgggtgacgagggcgaaactctgtctcaaaaaacaaacaaacaaaaaatctagggctgctatgtcatctaaagacatacccagcacaaagccccaagctcagcctttgaaacaggcattgtacacgtggagtctttgctactatttcttatgtaactgtgttccagaggcctcagacatgagaggtgttctgtgggtaccaattccatcttccctgaaaaatgacttgcctggtccagcagctcccttttgggggttcctagtctttcccagcacatggagggctctgagaaattctgcactcaagacagttttgcttatccaagtgttactcaaatatgtttgaagacatcactcaattcctcctccttcccacaattgcattcaacatctcaagagaccagagcctgacaggctgagaaaaactggctttggttgacacatcagagactagaaaaaagatccccaaaaccaggtttatgttattttttcaatgagtgatgaccccccgtcttaggtggaatctctttggagtctcaaattttttctccattttttacttggagatgataaaatagtctctgccagatcaccaggcactgtctctctggggcctcccagccatccctctatttatctcatggggcaagggggcccagtatgcaaattaaatagtacccattatgccaattaaatagcaccctacccaaagagctgtctcccaaggatggaaataggagctaacttgggtctctcaggagaacatttttgccttggaggatttcaaggtttactctcgggtatcagaatgtaaagggaatggctttaaaactatagcactcgaaaaaactttttgggtgatggaatttttttttttttttttgagacagagtcttttgagacagcctgctctgtcgtccaggctggagtgcattggcatgatctctgctcactgcaacttccgcctcccaggttcaagcaatgctcctgcctcagcctcccaaggagctgggactacaggcacccaccaccacgcctggctaatttttgtatttttagtagagacggggtttcaccatgttggccaggctagtctccaagtcctgacctgcctcggcttctcaaagtgctgggattacaggcgtgagccaccacgccctgccaggggtgatataaatatttaaaaatgggattatgataatgattatgcatatgcaaaaaatattaaaagtcacagaattgtgcattaacaatgggtgaattttgtgatatgtaaattatacatcaaaaaagtttattttttttttatttttgagatgtggtctcactctgtaatcctctgtcatccaggctggagtgcagtggtgcaatctcagctcactgcaacctccaccttccaggtttaagcctgcctcagcctccagagtagctgggaccacaggagtgtgccaccatgcccggctaattttttttttttttggagacagagtctcattctgtcacccaggctggagtgaagtggcacaatctcggctcactgcagcctctgcctcccaggttcaagtgattctttgcctcagcctcccgagtagctgggattccaggcacctgccaccaggcccggctgatttttgtagcggctaattttttgtagagatgaggttttgccgtgttgcccaggctgatctcaagctcctgaactcaagcgatccacctgccttggcctcccaaagtgctggattatgggtgtgtaccaccacgcctggctaataaagttgttttttaaaaaaacaaaaagattaaaagtcagggctgggcacaatggctcaagcctgtaatcccagcattttgggaggcctaggcgggaagatcacctgagtccaggagttcaagaccagcctgggcaacatggaaagactgcgtctcttttttatttttggagatggagtttcactcttgttgcccaggctggagtgcagtggcgcgaccttggctcgctgcaacctccgcctcctaggttcaagcgattctcctgcctcggcctcccaagtagctgggattacaggcactgccaccatgtccagctaatttttgtatttttagtagagacggggtttcaccatgttggccaggctggtcttgaactcctgctctcaagtgttccccctcctcagcctcccaaagtgctgggattacaggcgtgacccactgtggctggccagctgaaatgtcttttgcccatatcagcccctccctcctgctttccagtgtgccctgtgacaaggcttcacccttgctctgttcacagcaaagcacgcacgggcatcctgactgatcctggaggtttgaaatcaccttttagtaagtttctgcgtcctccaccttaccagcccttcatgtataaggtatttattgatcctttactatgtgctggctcatttatagcacatggtgatgaacagaatagacctggtccctgccatggaggtgactgtccagtgatgatggtggccactagtgctggagccactgatgccctttgccctttggccctactaccatgaatccttgcagtgactcctctccaggcaaggcaccattgtgctctcctttcccagatgggatcatcaaatggtgagtgggagccgggatcccagccagcccctcctcatgtcacttccattggaatactgactaccaagcctccctgctcaggaagcctccctgcctcggatgaactgtgtgcatcccaagctggaactcagcggtcccatcctttcagtctctactgggaaaagctagagaatccttgggccatcagggaaaggcagacacatttgcataataaatgaaaatcctatctgagctcctgccctgcctagagatttacaattcccaaacagttctgggaaggaaatagagagaatgctagtgggggatgggtactgtagaccaggctgtctgggctgcctggaagaggcatcattagagcggacacttgaaggatgacacagacctgccatgggaagggtgttggaaaagcattcctggcagagggaacagtatatgcaaaggtatgatggggacaaggcctggcccgtgcgtgtcagaagcagatggaaggcctgggtgactgggctggcagcacaaagagccaatggtggggatgaggccagacaacgggcaggccttggtcaggcagcgccttgcgggctgaggtgtggggtttggacttagttccgagagcactgggaagctactggagagtttcgggtttttgttttcagatcacggctctcaggcagagggtgggtggagaccaggtaggagcccatttgatgaatcagtgaggagtggaaggggccgggagggaggtggtaattcgcaggtacacagtaggcactcaataaactccatctacctagagttgaaattcagacatgcaggtttcaggaattaaatatgggggaccctgaggatgactgcacccccaccccacaagtatccatgaccagcacttggccatctatcaggggtgggggttcagttctgtttattttcagtctgtcactcaccaagacttttataaaatacaacaaaaatgaatgacttagaaaaacaaaagggggagcctgatgcagtggtgcacgcctgtgattcctgctctgtgggaggctgaggagggaggattactggagcctaggagtttgaggttgcagtgagctatgatcctgccagtgcactccagcctgagtgacaggcaagatccagtctctttttttttgttggcgggggggcctctttttttttttttttttttttttttttgagactgagtcttggtctgttacccaggctggagtgcagtggtgcaatctcagctcactgcaacttctgccccccacccaggttcaagtgattctcatccctcagtttcccaagtagctgggactacaggtgtgcgcccccatccctggctaatgttttgtatttttagtagagatggggttttgccatgttggccaggctggtcttgaattcctgacctcaggtgatctgcccgccttggtgtcccaaagtgctgggattacaggtgtgagccactgtgcccagccgaaatccagtcttaaaaaaaagaaaaagaaagaaaggaaagaaagaaagagaaaaaaagaaaggaaggaaggaaggaaggaaagaaaaaagaaaagaaaagaaaaaagaaaagaaagaaaaagggccgggcgtggggctcttgcctatagcccttcaggaggccgaggcgggaagatcactgagcctaggaggggcagcatagtgagacccccagcccaaaaaatagaaaaaaaaaaaaaaaaaaagaagaagaaagcccactggtgtaaatcaatttaaaaatgtggagagggacagtaggatgctaatgagcagctgggaaggtgagatggaattagaaagcaatctttggcacttggcaaatcatcatgatgatgagttcaggcaagaatcatcaacgaatgccacagtgagtgggcctcaggggttgaatggaaagaaatgtccaccacctaataaggccctcgtgaaagcagccttatttggaaaaaaaatctttgtaaatgtgtttaagttagtgatcttgagataaggtcatcctggataactggtggccctaaatccaatgacacctattcttttttctttttctttttcttttttctttcttttttttttttttttttgatatggggtcttgctctgttgcccaggctggagtacagtggtgcaatctcagcttgctgcaacctctacctcctgggctcaggcaatcctcccacctcagcctccagagtaggtgggactgtaggcacacaccaccatgcctggctaatttttttatgtgtttggtagagatggggttttgccctgttaccctggctggtcttgaacacctgagctcaagccatctgcccaccttggcttctcaaagtgctggtattacacttggtgagccactatacttggtctgacacatattatttttattttttagagatagtgtctcactctatcacccagcctggagtgcagtggtgtgatcatagctcacagcagccgccagccttgaactcctgggctccactgatccccttgcctcagcctcccaagtagttctgaccagagacacacaccatcatgcctatctaatttaaaacatttttttttctttgtagagatagggtcttgttatattgaccagactggtctcaaactcttcggctcgagtgatcctcccgtcttggcctcccaaattgctgggatccaccatgcccagctgacatgtgtttttgtaagagatagaagagacagacacttgacgaggagtgccacgggaccacagaggcaaagacggcgcgatgcagccgcaaaccacaaacacctggggccaccgggagctggaagaggcgaggagctgattctcccctcgagcctttggagggagcacagctctgctgaaaccttgcttttagactctgactgccagagctgtgcaagaataaatttctgttgttgtaagtcacccagcttgtggtgatttgttagggcagccaaaggaaacagaatggatgtggccaggagtagtggctcatgcctgtaatcccagcactttggaaggttgaggcaggtggatcacatgagtccaggagtttgagagcagcctgggcaacataatgagaccctgctgctcaaaaaaataaaaaaactaaaaataaataaatcaaaataagaaactaatagagtgggtgtgaagttggagagcaacgggatggttacatggtctcaaagtaccttcccgcaggggaagcatgggaactttacagtggagaatcctggccaacgccgtgagcgtgtgagcggtgctaacctcgccagaaaagggacccaggcagcgtgggcctcctgccaaggtgcaccaggagccaggcatctggtcagtctgaggtgcctgcctgagggcagagctgagtcccacccagacctgctccctccaaggcatcggggtactctgcacgtcccaggctttgtgaacgtgccttccttttgcacagtgtctccctcccatcgcagacatctggggccacaggtcagccttctgagaacgaggccgctgggaggcacaagtgcaggacagacactgttaaccatggacaaggggaggcgtttgccttccctttctctgtgtgctctgtgggagggcttcctagtaaccccgccagcttctccattgctcggggaggaagacagaggccagctcatagccatcaccaggtgcactggccagtaagcagcagagctgggcgtttcatgagggctgggtcaggcaaaagcctgtgctccctccactccgggagcactgggccctttggtaggatggaatggttctcagaaagcctttcttctgtaagctgcgttcaagccagtaggacagaaagatgtcttttgcagctagggggtgaatcttttgaaattaaaaattttttgagacagggtcttgctctgttacccaggctggagtgcagtggcatgatctcagctcactgtaacctccgcctcctggggctcaagtgattcccccgcctcagcctccagactagctgggaccacaggagtgtgccaccacacctggctaatttaaaaaaatcttttgtagagatggggtctcgctatgtttctcaggctgggctttcagcatttaaactacatccaactcacaccagaagggatggctcacctgtgattgggaacaacactaaagctcacgtgtagttgccctgtccatattaataatgtccatgaagtgccagtttagctgtgctacttacactttttttctaactcaccttaaaagaaacatagaactgttggaataaaagttaaaatagccattggaatactacttaaaaacattcatgtgctgggtgtggtggctcacgcctgtaatcccagcactttgggaggctgaggcgggtggatcacctgaggtcaggagtttgagaccagcttggccaacatggtaaaaccccttctgtactaaaaatacaaaaattagccgggtgtggtggagtgtgcctgtagtcccagctactcaggaggttgaggcaggagaattgcttgaacctaggatgcagaggttgcagtcagctgagatggcaccactgcactccaggctgggtgacagaatgagactccatctcagaaaaaaattcatgaatgccgctagatggctggttctcaaacttggctgcacggtggaatcacctgcagaaatttacaaagccctgatacctgggccccacccctgcagattctgatgagtgggtctgggttgcggcccagggcagtggggtttaaaaagcttcctctagggccgggcgcggtggctcgtgcctgtaatcccagcactttgggaggccgaggcgggtggatcacgaggtcaggagatcgagaccacggtgaaaccctgtctctactaaaaatacaaaaaattagccgggcgtagtggcgggcgcctgtagtcccagctactcgggaggctgagggaggagaatggcatgaacccgggaggtggagcttgcagtgaactgagattgcgccactgcactccagcctgggcgacggagcgagactccgtctcaaaaaaaaaaaaaaaaaaagcttcctctagggtttcaataggcagccaaggttgagaaccctgcaattgacaaacagatgtgacccaacgacagatttggggtcacatgctactgccttagtaaatctgtacagcaggaggatggagaggacctcccctaagcttacccctactccctgaagtctgcctaaacttgcccgcccaccctgccctttccttcttggacatactgaaccacagcatcacttgctaattgcctcctgtgtggaggactcggctccccaaggagagattgtaagaaggtgggggtggcatcaccagattgttgggggacaacacacaccacttcgtgtttttcatttatttatttattttttttgagaccgagtcttgctctgctgcccaggctggagtgcaatggcgcgatcttggctcactgcaacctccgccacccaggttcaagcgattcttctgcctcagcctctcgagtagctgggactacaggtgcctgccaccacacctggctaatttttgtatttttagtagagacggaatttcaccatgttggccaggctggtcttgaactcctgagctcaagtgatctgcccacctcggcctcccaaagtgctgggattacaggtgtgagccaccgcgcctggccaacacacaccacttctgaatctgccacaatgtgcagcccaggcccacagtaggagcgtattaaagacgaaagctggatggtcatgaattggagctgtaaacttggctgcttcatgggattattatggactcccagaaatgccgattataacctcaatcaaatgtcaaaaatgtccctgctcaggtttcctgatgcgtgggaatcaacagcatgtcaggtattatggaggacatggagctgttttctgccctgagctgtgactgcaggcactgggaaagggaagatacgtttcctgcctggaggaggggaggatgccaggggaggaggaggatattggtggtgatagtggtgactcctcctgctttttttttttttgagatggagtcttgctgtgttgcccaggctggaatgcagtggcgcgatctcggctcactgcaagctctgcctcccaggttgatgccattctcctgcctcagcctcctgagtagctgggactacaggcgcccaccaccacgcccggctaattttttgtatttttagtagagatggggtttcaccgtgttagccaggatggtctcgatctcctgacctcgtgatccacccgcctcggcctcccaaagtgctgggattacaggcgtgagccaccacgcccagcccttccacctgctttgatgggggttcactgtgtacaggctcagtgcgaagccccctgcgtgcattttctcactgaattctcctgtcccccacaaacttgggagaccaaactctcactctccacactaggccaggtgcttctgagtgtggaggcatttcactgcggtgcctagaatggagcctggtgtgttatgggtgcccaggaaacatttggagaagtgaactattctcggtaggtatttgtcgaatcaagctatgtttctacacatggtctgaaagtggcagaagaggagcacgacctctgggtctgctcagaccccactccaggacttgcttcagtccctgacaggcaaacggggatgcggggaagggaaccaggcaggaactccgagagagcgcctggtggcgggggctgcggtgctgttggtgccagccgttggagttgtaagggtttacatttcaactcctggctttaagttcccgagacatgcagggaccagggcgctgagggagcgtaggtgtcgagggaggacttttggctagggcgagggtcatttgtttggaaagtctggctcctcatggaatggtgcacgtggcccagagagagtaagaatgtgtttctgcctttcagggatttatcagttggagttgggggactccactcaggattgttattttcaattttattattttactttattttatttaattaatttattttttgaggagtttttgctcttgttgcccagactggagtgcagtggtgcgatctcggttcactgcaatggtgagttcaggtgattctcctgcctcagcctcccgagtagctgggattacaggcacgggacaccatgcccaggtaattgttttgtattttttagtagagacagggtgtcaccatgttggccaggctggtcttgaactcctgagctcaagtgatccgcctgtcttggcctcccaaagtgctgggattacaggagtgagccaccaagcctggcccgttatttttaattttaaaaatctctagataaaaaaaagttagcatggtaaaaatattccaacagaaccgaagagctatatttgttggaaagtaaactttgatgtcctctctgaccccatccttccccctggaggcagccactgttaactgttaacactttccttccagaaagtctgcacaaatataagcgcatgagacagacctcttctttcttctacaaaagggcacttactttgcacactcctttgcattttgccttttttctttctttaaaataatagcagttagccattatagctctattatttccatggttgcgtgctattctattgtgcatatatagcataatttattgactgtttaacatcagcattatttttcttttgctaatacaaactatgctgcaaagaacctacctttcactcatctttctgaacatgtggaagaatagatgtacattctgtcacataaacatacatattatatagtagtaggagttctggaataaagggcatatgcttttaaaactattacagttattgccaaattgtcctcctgagaaattgtattaatgtttatcgcaacgaatctcatgaatatgactctttccccatctacttttttttttttgagacggagtttcactcttgttgcccaggctagagtgcaatggtgcgatctcggctcaccacaacctccacctcccaggttcaagtgattctcctgcttcagcctcctgagtagctgggattacaggcatgcgccaccacacccagctaatttcgtatttttagtagtgatggggtttctccatgttggtcaggctggtcttgaactcccaatctcaggtgatcttcccacctcggcctctcaaagtgctgggattacaggcgtgagccaccgcacctggcccccatctccttataaacactgcattatcaaactttttggtatttgtgaatctaatgggtaaaaatggcatcttcttgtttacgtgaacattgactatgaggttgagaattttttcatgcttttgtttttatttttgtgagctgcctgtttgtgtttctggtctttgttcttttttttctttctttttttttttttttttttgagacagagtctcgctctgttgcccaggctggagtgcagtggcgtgatctcggcttaccgcaacctctgcctcctgggttcaagtgattcttctgcctcagcctcccaagtagctgggactacaggtgcccaccaccatgtccagctaattttttatatttttagtagagatggagtttcaccatgttgcccagtgtggtctcaaacttctgacctcaagtgatccacctgccttggcctccaaagtgctgagattacaggcgtgagccaccacgctcagccttttttttttgctttttttttttttttttttgagacagggtctcactctgttgccagtgcagtagagtgattgcagctttgacctctcaggctcaggcaatcctcctacctcagcctccatactagctgggaccacaggtgcatgccaccacactttgctaattttaaattttttgtagaggtggaatcttgctatgttgcccaggctggtcttgaactcctggactcatttgatctttttctattggaatgtttgttttttaatattggttttaatattggtttgtaggagtttttatatattaagcagcttaatactttctctatcttaccatattggatgacacagtctgttttggggtctttgtgtagtgatggagatgagcccagaataatacaggatcaaaggccagggggtccccagtgctgtgtgaatttgcatgagtcaggagaggctttgtggggagatgatgtggagatgaagttttcttttctttttttttttttctgtcacccaggctggagtgcagtggtgcgatttgtgctcactgcaacctctgcctcccaggttcaagtgattctcctgtctcagcctcccgagtagctgggatgacaggcacgtgccaccaagcccagctattttttgtatttttagtagagatggagtttcaccatgttggccaggctggtcttgaactcctaacctcaagcgatctgcctgcctcggcctctcaaagtgctgagattacaggcatgagttaccatgactggcctggaaatgagttttaagggatgacatggaggaaaaggatgtctcagtagagtggattttataagcagcgtgtcatggaaggaaattgtgtgggttggtggaaggttggggaaattttaaataatcctgtcttctggaggtgaagtgctgggaggggtgccgtgggggtgaaataggataacgttgaaggccagttgaggagttggttcaatttcctgtaggcagcagggagctgtggatttgaagcaaatgatcggatctgtgttttaagaacactacacgggttgcctttttagattggattgcaggcaaacaagattagagaaggaaaaccagttaggagactattgcagcgaggagatgacagtggcccaggcaaggtaatgacgtggacactaaaaaccatttgtgcttgggaggcaggatttgcagagatggtgattagataggtgtagaaaacagtaattcagttatgtttctctgtgtgcaaggggaattcacaagacgtcagtgggcatgggaggaggtgagaatagggccaagttgtggagagttggagggaggatgttcgatggtcctcttcacagtcaatgatgttccaaagattcctgactctggattagacatcttttgggatgtctgcccagcctacaccttctctgagacctgccctcctttccacaggtgtgggctcttattgccaggtgatgctgcctctctgtggatccctggctcaggtgcagaatcctgacccagtggacactgacgcaagcttctattttggaaatctggaatctgaatgtggatacactgggtcagttggctacaggaccagggctcagctggcttgtcctgcgagctccgggtggctgtgtttgtgctgtgtgtgactggagcagaagcagcagagagggatgaagtgaagtccctggacagagataggcaggaacctctggttcaacaagacagattgaacctgcctgactaacgaggcagtaaaggaatgaaaacatgtacattcactagggcaggaacaggaaggggagatgacagctcttcagagatgtcagaaagtttggaagaaggaaagccgatggacaaacgacaacgggtttatttttatttatttatttttatttttttgaaacagggtttcattctgtcgctcaggctggagtgcagtggcgtgatctcagctcactgaaacctccgcctcccggatttaagagattctcctgcctcagcctccagagtagctgggattaaaggcacctgccaccatgccaggctaatttttgtatttttagtagagatggggttttaccatgttggccaggctggtctcaaactcctgacctcaagtgatccacccgcctaggcctcccacagtgctgagattataggcatgagccactgtgcctggcctgaatgcttttaaaagggacagttagactcccagatcttccccatcactttggtcagctaggcatctacccttttccatcccaagaaaagacaaactaggatttcctctgaaggctggaatcaggggaacctggatttagagattccagcctaactgtggctgcaggtcatgccctgaaaacggaattgcaggaaagtctacttataaagcagcgaaatgctggcatcttcctggctcagcttctagaatgctggtggccaggggcctgaggctggaggattcttctcaggtagggttgctggataaaataccggattcattgttacattggattcagataagcaacagatacttttttctcggcataaatatgtcccccaaattacaaatttttattagtaaaatctggcaatgctgttcagaagaaactaaggcccaagaaaaaagtgctaggggtgccaaccctggttccattcccagttaaatgctttaatcccttcagctcctacccagaggcctgagagtaagcctggtccatgtccccgctggagcttccaataagcatttgagagtctcgtctttaaatgtgaacaaatagacaagatcacccaatggaaaaacaagctaaggtttggccagtgggggtccagaggtccatcttgcttcaaatctcttccatagctccctgctacctacaggtggctaatgcctgtaatcccaacacttggagaggctgaggtgggaggatcacttgaagccaagagttctagaccagcctgggtgacatagtgacactccgtctccacaaaaaaaaaaaaaaaaaaaaaaaattagctggttgtggtgatgtacacctgtagtcccagctacttgggagaaggagggtgattgcttgagctcaggagtttgaggctgcagtgagctatgattgtgccactgcactccactttaagagatggagtgagaccctctttttttttttttttgagacggagtctcgctttgtcgcccaggctggagtgcagtggcaccatctcggctcactgcaacctccacctcctgggttcacgccattctcctgcctcagcctcccaagtagctgggactacaggcgcccgccaccacgcctggctaattttttgtatttttggtagagacagggtttcaccgtgctagccaggatgctctcgatctcctgacattgtgatccacctgcctccgcctcccaaagtgctgggattacaggcgtgagccaccgcgactggcccgagaccctcttaaaaaaaaaaagaaaaaagaaggaaaaaggagctcagaggatgcggggagaatgtagagagccgaggagagctccagagacacagagacaagagaccagcctcagaggctgaccaccagcctcctgcttgctcctcagttctccactggtggagtccctctccttcctgtctctggcttctgggatagagtcctctctgctcagagaaccccctgggggtttaagcgctgcaaatgtgtttccttctcttctgaccaaagggttcttctgtaccatcactcaataactcccaaccaggatgtgcctgcctggacccccatcgtgctcatcctgagcagcttggaggaagaggcctcccctggggcagcagtcgacccagggtctctgccaaatgaccctggcagctgcggccccctcgtgccccaggagtcagggtcctgtctggaggctccaaccaaaagctggcccgggtcccgactgccctctcagctggcagaggatggagccatttggctccgcttctgaagtgggcgccacgagctcacgcttggctcgtgctcctcaccgatgctctctctgctcggccttgctgagccaggcggggttctggcttcagtgctgcgtcttctctcctccatgaacagaaatccccgaaggtcagcggtcttgagtataatcgtcttcagatatctgaagagccggtgtgaacagccgttcaactcaattgccccacttttcatcgagcatttcctctctgcctgcacgactgaggtcttctctgattttttttagtaattcatattgatttattttataagttctattgcttctattgataatttcattaattaatagaaaattaagatgaggtcattttggtagcacaaatattgaaatagagttttgaaatagtatgatcaactaatttatcgtcgtcaccaggactttttgatagtgaaactgggctcttttactaattatgtggggaaaacaggtataaacggagactgtcccatgcaaactgaaatatatcatcactattgagagatgacttgctcaaaccttaacatcccatttatttccgaatttgttttaatgatggaaacaagggagggaatctgagtcacacagggagtagctgcaaatggtaacaggttttttttttttatgcttgccttttttattttttgttttgagatggagtcttgctctgtcgcccaggctgcagtgcagtggcgttatctcagctcactgcaggctccgccccccgaggttcacgccattctcctgcctcagcctcccaagtagctgggactacaggcgccccccacctcgcccagccaattttttgtatttttagtagagacggggtttcaccgtgttagccaggatggtctcgatctcctgaccgcgtgatccgcccgcttcggcctcccaaagtgctgggattacaggcgtgagccactgcgcccggcccgaatttgttttaatgatggaaacaagggagggaatctgagtcacacaggtaacaggttttttttttttttttttttttttttttttttttaatgcttgccttataatagtagttctcaatcttaactcacccagggccgggtctggcaaactacaaggtccagctgcagtctgtttttgtaaataaagctttattggaacacagctgtggccactcatttaccttctgtctatggctgctttcgtgcagcacagggatagctgatgagctgcactggagacaggacagttcacttctaggatatttagtatctggccctttatagaaaacattttctctctgagcgtagtggctcatgcctgtaatcccagcactttgggaggctgaggtggaagagtgacttgagcccaggagtttgagaccagcctgggcaatgtagcaagacacccacctcaatagatacaatagatagattatagatgatacattgattaaatgtttgctgtcccccaacgttgggaatgtaaagaaattccagtgtcttactcccaagagactctgatataattgccctgtgggacagcctgagcagcactgagtcttgccgtgacatccaggctgtagtgcagtggcgcgatctcggctcactgcaacctctgcctcccgggttcgagcaattctcctacctcagcctcccaggtagctgggattacaggctaccatgcctggctaatttttgaatttttagtagagacggggtttcaccatgttggcgaggctggtctcaaaatcctgacctcaagtgatctgcctgcctcggcctcccaaagtgctgggattacagatgtgagccactgcacccggccaacactggcagttttaacagtgccttaggctgacagctgggtacaatggtgcatgcctgtaaccccagctactaggaggctgaggcaggaggatcgcttaagcctaggagtttgaggctgcagtgcactgtgattgtgcctgtgaataatcacagcaacctggcgacagaatgagaccctgtctcaaaaaataagagtgtcttaggtgattccaccacggagtcagtggtcagcactgagaaccaggatattaaagccaaattcggccaaaggtagtgtctcaacatgtgcccccataccattcattctttccgtgtcaggtaacacgtgggtgatcttcagtgttttaaatctgggagaggggacacatgggttttaatttttgttacattttgaaaatagttataagatttactttaaaataaaacttgagctgggcgtggtgatgggtgcctgcattcccagctacttgggaggctgaggcaggaggatcatttgaggtcaggagttctgggctgaagtgtgttagctatgctgatctggtgtccacactaagttcagcatcaaatatgttgacctcccaggagcaggttgcctaaaaggaggggtgaacacgcccaagttggaaatggtgcagttcaaaactcctgtgctgatcagtggtgggatgacgcctgtgaatagtcactgtactccagcctgggcaacatagtcagaccccatctcaaaaaaaaaaaaaaaaccaaaaaaaacaaccagacaaacagacaaaaaattgaacttgaatcgaagacttggggtggacttacctggtttagtctccgcatagccctctggggactggattccacttttccttttacaggtgaggaaatggagcccctgtggggttgaaggacttgctccaggctgcacaaaacctcaggctgactctttccaaagcaatgcttgacttcttgggagggtttttaatttttttccccaacaccctcctttccttgacaagctcctgaatatcagagaaggccagagaggatggtgtcctgtgttcctgaaggcaggaagtgtttattgagcccctactagctgcagagctaggcatgaaactgtcacagtgaacagaaaagggccctgccttatggagttggacgtccaccgtggcagacaggccccgcggggagtttgggtgaaaagtcgttgaatgtcaggcaagcagcggccccggtgctgctgaccttgtctgggaggatcaggaaagtttcctggggaagaggcagggagatctgagctgaaacatggaggatgaggctgtggctgcctgtctttagtgcatggaagagaattcctggcagagggaatagcacgtgtgaggacccagctggggagtccagggctggcacctggagagctctgggaggggctctaggtggagctggagagggcagaagtgggagggaggagggaggcaggttccgcaccacccccagggggttaaattagactggtgagtcaagattccaagaagacgaatggctctcctgccagaattttaggcaactccacattccaagacagcccacagcttcctctaacagccacgctgttcccagccctggtggaggaggcaggagccggccactagctgggacactaggtgagaggttaggcctcaggttggcatctgggtcggatgacagagtcgggtggaggagtccaagacactggagaccctcaggcccaggctcagggttcccagtcctgcacctgttacctgtctgcatttgcgtccttgggaaacaaactttgaatcagagatttatgtgcaggcagtttagtggggcgttttctcaagagctgcacctgtgagggagggtaagcagctgggctgcagtgctgaggtctcggctcttcctcatgggaactctgagccaggtgggcgcttaagagatgttcccaatcaatcaaggccaaaacttatctaccagtcatcagacgcaagctgtccctcagggaaggggccacgggatcagatgaggcaactctgaggctgagggcaattcctggggagttgcttggctgtgagctgccagctcccgctcccagcagccacaggaatggagtgtcctggtctggaagggtggatctgcaaccacagcatccactacagcagctgtgtgacctggagcacacagcctaacctctctgagcttcctttaggaccacagcatccgctacagcagatgtgtgacctggagcacatggcctaacctctctgagcttcctttatgcaaaatgcagtcactgggctgttggaaggattcagaatattgcatataaagcacctggccccagtcttgagctccaggaagcacccaggaagtgtttgtttagttgaaaggatcagtgaatgtgttgcttcataatgagaatgagtctgagaaccccctttctggtgaaaagatcacgggcccaggagtcaggagagagtggtcgcttccagcagtaactggttgtgtgacagaagtatgataagaccgtaggctttacatttagctctctgggcgttaaattctttatcttgtaaacagggataatgacacctgtgccaccttctcctaggctatctcctcctcggtgttgggaaactgaatggagatcgtgcgatgggaggtgaaagctttgaaagggaaaagatatcatcagtttctacaggtggggtgggcgtggcagcaggtggcagagcaggaagtggcctaggtgagccagaaccctggtcaggcgtgagtgcagccctgcacccacataagctcacacgtttgcacaggctccctggcacatgcatgcccctgcatgcatgtacacacaatcatgtgtaccccagtaatgcacccactcacaaccaccagagcaaaacaaagacaaggagtggagctgtctgtggtgcacctggggccccagctcccctcccagcccatgactacactgtggagggctgaggaatggggttgctgagaaggagcccaggctgggggccatgtgcatgcgggtcaggctggcaaagccgtctgcctgcctcttgttttaggctgccaggctgggcaaaggccacgtgctcggtggaagagcccaagccaatgtaaatgggcccctttggaagtagggctcatctggagagcaagcaagcaaaacaagcttagcttttcatttagggaccgtcacagaaaactcggaaatgcaccaaagagttaatggtatttggcgctgatcagtggcattgagggtgctttctatttccgtccctttgattccactcatttttctatgtcaacatgcattagcattgaatgattatcaggatcgtcagtgtgggttggctgaagatatttgttgatggtgtttgtccagctcctttccctgcccccagcgcctcagtggccctcctgtgctctgagcggttctgctaggactgtgaattgtgaaagcttggacccggtgctgtgaggtgggagtgtgggctgggcctggtaatctgcagccctcgtccccaagtccatgggaattgtcacatggcctgtgctgggctaatcagaatcctgccttgtcatgttataggctgaccctggggagataagctctccctgaaatattaacattgtttctggccatgttccctttcccttcaccaccgagagaagcaggagggagggagggagagagagagagagagagaaagaatgattgtaagatatgattcattattttatgtacaactgtgatggttaatttcatgtgttgactgggctacgggatgcccagatagcctgtagaacattagttctgggagtgtctgtgagggtgtttccagaataatttagcatttgagtcagcagacggagtgaagaagctctgccctcaccaacgtggccaggcatcttcccatcagttgcgggcccaaatagaacagaatggtggagggagaactagttccgtcttctgcagctgggatgctcatcttctcctgcccttggacatcggaactcctggttgtcagggttttggacttggactgaatgacaccaccggctttcctggctctcccactggcagatggcagattgtgggacttctgggcttccataatcctgaaagctattcctataatcaatctcctcttatacgtctatatgtatcctattggctctgtttgtctggaggacactgatttgtacaattaggaaagaaaaaaaggctacgagtgaaaccatgtctttggctgtaaatcacattctaatttcagagatattaatacgtgaaaaacatgtacagacatgcatttaacgatggggttacattctgagaaatgcatcattaagcgattttttttgagacagagtctcgctttatctcaacggcgcgatcttggctcaccgcaacctccgcctcccagattcaagagattttcccacctcagcctttcgagtagctgggactacaggagtgtgtcaccatgcctggccaatttttgtatttttgtagagacggggtttcgctgtgttagccaggctggtttggaactcctgaccttaggtgatccacacgcctcagcccctcaaagtgctgggattacaggcatgagccaccacacctggccttttaagtgattttcttgtgtgaatgtcatagagtgtacttacacaaatctagatggtatagcttactacacacctaggcgtaatggtatagcctgtggctcctaggctacaaacccgcatagcacgttactataggcaattttaacataacgtatttatgtatctaaacataactcaggctggaagcagtggcttatgcctgtaatcccaacactttgggaggctgaggtgggcagatcacctgaggtcaggagttcaagaccagcctggccaaaatggtgaaaccctatctctactaaaaatacaaaaactagctggccgtggtggcacgtgcctgtaatctcagctactcaggaggttgaagcaggagaatcacttgaaccaggaaggtggaggttgcagtgagccaagatcatgccactgcactccagcctgggtgacagagtgagactccatctcaaacaaacaaaagactggccgtgcagtaggtttctttatcccagcatgagcacatgagcaatgcattgcactatgacattacagcagctacgacattaggcaataggaatttttcagctccattataatcgtatgggaccaccattgtatatgtggtttgtcgttgactgaaacagtgttgtgtggtgcatgagtgtacccaagaatccacaaaatgtgtatgtggatggatggatggagagagagacaggtacagcaagagagtgtgagcaagaccaagacagtgagagtacacgcgagatcaacagaatgtgtgtgtgagacagaaagggatggagggagggagattcctgaagccatctttgagcacctggattcagccattcctgaagctgaccttgttgttaaaggaggctataaagatccatttttttcttacgcacatatgaatcagatttctgtcacaaaccggagtctgggctgattcctcttctgcctctgatcctgtttattgtaacagaaagggttttctttttctgtctttcttgtttgtttgtttgtttgtttgagacagagtctcactctgtcactcaggctggagtgcagtggtgtaattttcactcactgtaacctctggctcctggattcaaacaattcttgtgcctcagcctcctgagtagctgggattgcacgtgcccgccaccatgcctaattttttttttttttttgtatttttagtagagacagggttttgccatgttagccaggatggtctcgatctcctgacctcgtgatctgcccgcctcggcctcccaaagtgctgggattacaggcgtgagccaccgcccccagcaggatcactgttaaacctccttgattgtaagtgttggaaaccccagttcaaagtagattaagtgaaaagtggagttgattgacttgtgtgtgtgaaaaatccaagagtgtacaagcttcaggcacagatggatctagggtcttacatgatttttttccaagatgtggcctttccctttctgggcgctactttctttgttggctgcactctcaggctggctgttctttgaggtgactccaggtcggctgtagaccctccaagtccagaatctcagtggaaagaaatctccttcctccaaaaaattatatctgagggcctagaattgagtaccagtgggcaggtgccgtacatgaaccaatcatagggattccctagcctggaagagaatgtactgattgggcatgtgaggtcacatgacccttggggtgggagggtaaggaccgaaagtccctatctgaaagcaatggagaggtggttccccagagaaaaatgcaagtgctgtcatcaggagaggcaatggacacccggtcatcatccccaataattcccgtcctcctttctttgagtaactacatcccagcgaagtcccctaggtccttccagaacttggtccccagcatcttaacctctccccagagaagtgtttctcactgggctgccatccagggatacttccagtctttgggaggtgttggggatcctgtctttccctctgcagaaatgaaacaaaggaggccaggaagagacatcccatcccttgtggggctggaagccgcctgtcacagaaaccaggagccctgggcaccgtcatatgattttcctcttttgtgtttgcagaaaatgtggtattaatacaggatgtttgacaatgcgggcaggattaaagggcggccctaattgaccaaggagtgggtttccaactggttactttctagaataattccatgcagcaggcgtgattagtcatgtcatcttcatgtcatttgcagtggagaagttcagcgtcctaacagtttgtgactggcatgcctgatactgaacaggaaccagccactttggcccataaaaaggatacagcaagtgtctctgagctatggcctgaccagctgcaagcctgtccctgctacattgctaggtggaagagaccgcttttcttttccttttcctttttttttttttttttgagatggagtttcactctgttgcccaggctggaatgcagtggcacgatctcggctcactgcagcctccgcctcccaggttcaaacgattctcctgccttagctttccaagtagctgcgctgataggtgcctgcaaccacctccggctaatttttgtatttttagtagagacggggttttgccatgttgcccaggctggtcttaaactcctgacctcaggtgatccacccacctctgcctcctaaagtgctgggattacagtcatgagccaccgtgcccaacccagaacttatttattttaaggaaatacactcatgcggttatggaggttggcaagttcaaaatggcaggctggagacccaggggagagccaatgctgcccttcaaacccaaaggccgtctgcggcaggactcccccctactgggggaggtcagtcttttgttctattcaggccctcaactgattgggtgaggcctacccaggttatgcggggcaatctgcttaccacccatttaaatgtgaatttcttttctttctttctttttcttttttttgagacagcgtctggctctgttgcccaggctggagtgcagtggcacgatctaggctcactgcgagctccgcctcccaggttcacgccattctcctgcctcagcctcccgagtagctgggactacaggcgtgtgccaccatgcctggctaattttttgtatttttagtacagacggggtctcaccatgttagccaggatggtctcgatctcctgacctcgtgatccgtctgcctcggcctcccaaagtgctgggattacaggcatgagccaccgcgcccggacttaaattttaatttcatctaaacaccttcatagaaacacccagaataatgtttgactacatatctgggcaccatggcccagccacgttgacacatacaattaaccatcacagatatcaactaagtgaaaccatgcagtatgcgcccttttgtgtctggcttttttggtcccaccttatgtctataagatttatccatgtgattgtatgttcattcttttactttgctatgtaatactccattgtattattatactaccatttatttttattgttgataaatgtttgctttatttccagtttggggctgtcataaataaaactgccgtgaatatttttgtttatactatttggtgcacataaatgctcacttctgggattgtggaattgttgagacacagggattcctatgtctcacttcagtgggtactgacacaccactttccaaagtgggtctatctgttcacctctcagcagtgtgcgagcattcccgttgctctgcaccctcgtgtagactggatattgccagtccttccgattcagccattctagtgggtgtgaattggtatctcagtgtggttttgattatgcctttatttttaaaaaaatctgtattaaaggagaccaaaaacagactctcatctaacattaaattttttttttttttttttttttgagatggagtcttgctgtgtcacccaggctggagtgcaatggcatgatgtcatctcacttataacctctgccttctgggttcaagtgattctcgtgcctcagcctcctgagcagctgggattacaggcgcctgccactacacccagttaatttttgtatttttagtagagatgggatttcgccatgttggccaggctggtctcgaactcctgacctcaggtgatctgcttgccttggcctcccaaagtgctgggattacaggtgtgagccaccatgcctggcctggactcccatctaacttaatcttcataaatatttctttataaagatgaccctatgtgtcagttttcagagggagaaactagcatttactttgtactattctctgacgggagctgtgctaggagctttacagattttatcccatgccatcctcaagacaatgcttttaaatttatttttaaatttattattattattattttgagatggagtttcactcttcttgcccaggctggagtgaaatagcgccatctcggctcactgcaacctctgactcccaggttcaagcgattctcctgcctcagcctcctgagtagctgggattacaggtgcctgccaccacgcctggctaatttttgtatttttagtagagacagggtttcaccatgttggccaggctagtctaaaattcctgacttcaggtgatccacctgtctcagcctcccaaaatgctgggattacaggcgtgagccactgcaccaggcctattattattattttttgagacagggtctcactacgttgcccaggctggtctcaaactcttgagctcctcccaaagtgctgggatgataggcataagccaccacacccggcctcaagacaattcttaaaagatgtggacaaccctggggatagactaggcagacaggcagtgccaccaatctcgcaagccctgagcatgaaaatgagatgtcaggtctctcagggaactgacgcagcaattgctcctgcgaccggcacagtgtgaatatgacagatgtcgctgaaaagagaaagctgctctggatggagctgctgcaggaatcagctgaggcttgagtgtaaatgctttatttcccattcatctctgcatcaggaccacaaatggcagaccgcaggagccgagtgtttgcctgcagtttgccgcatcagccctctggcgtctgggccggtgacatgtccttaccagtttctcatgaagataatagatgaaggtattttgctttgtgaagaaatgtttattgttgataaatgtttcgtgttcaggacacctgaacacgaaacagcaggcaggcattcttgaaataaaagtgaatcctgatgtttaaaatttatctgttgaaagaatccattttccccctatttctgtcattttgctgtggagtagtgaaaaattcattgcagactgggttttgtgaaccactggggtaatagaaaagtacagactttggtgccaaacttaggtttaggtcacaaacctggtacttagggctgcatgactttggcaaagtcacttcatctttcgaagacccagtttctgggtaaaggctcggaaggttgtctgtggaaagtacctggtacagcacccagcctatgggaggggttcaataagtgtcaaatgaatttctgttgtatttcaggtccataatcctttagctacaaatgcaacattttttaaaactacacaaacagggagtgtttttcttatcttcttatgcttggttcaaattcacttggcagcaaaagctgacatgaggctattttatagtctctatttatccctatgggcataactactcatatgttctgctttagaaatattaacatatttgatactggtgtgtcttcccaggcctcggggaggtcatatagtgcacagcatacgcaatgtactatatacgatctggaccattctgaattctgatatacatctggattttaaatgacaaactaaattcagatccacttaggaaaaaaaaaagatatgtcatctcatgaacattaaaaaaaaaaacccaagggtattctaccttcaggtacagctggatccgggactcaaatgatgcctgtatgtttctgtttgtctctccactcagctctgagactctctgctcttctttgagttttggcttcattcccattcatgcttagacagggtttctttgcatcgtgggaaacagggtcctttgcagctctcacttctaagaaagtgagaccctccccctcctggcattgaatatcaaatttcagtgaagattccgattagctcttcttgcggcacgtgcccactgcttgagccaatcagcatggaggggaaatagggtcttgtaattgggtcaagtgcctactcctgcagccctgcttcggatggggggagaattgatagcgctgcaagagaagtgtggggccaggcaagccagcagaggccaggccatcgattacaaagtagctctgtggcaatcaagtccttcatccacattcccagccccagggaaatcccagtctaagcaaaggacatcttggaggaggtggcgcctcacaccttctgaacctttccttttggctctgcatctgtgctacttggtgacaggtgcatctcttgtgacagcctcacctcttgcagatccttaaggtctccctgaatctgcagtcgtctctttttctgttcctcaacgtgactggaagagctgccacaagctgttcctctgctggaacgttcttggctctacttctcacctggtgaacgctggctcacttgtgattctcagtttaaaggacaggtcttcagaaaagacttccctgactctctaaagcctctcttctagttccctcccaatccctgccctcttttcttgatcgtgttcattccgttttgtaattatatattaatactgtgtctttatttgtttagaaactgtctccccggctagactgtcacaatttaaaggcaaggccatgtctatttcacccacactgtatcttctcagagccagactcacagtgggtgccaatagtttgtttttttccgagacagggtctcacttgttggagtgcagtggcatgatcacagcagactgcagtcttgacctccccgggctcaggtgatccttccacctcaaactcctaagtagctgggactacagttgtgtgctaccatgcctgactaatttttgtattttttgtggagatgggatcttgccatattgcccaggctggtctcaaaatcctgggttcaagtggtcctcctgcctgggcctcccaaagtgctgggattacagatgtgagccaccatgcccggccccaacaaatactttttgaatgaaggaatgaatgagtgagtgaatggcaaggcttgaattgaaaccctggcctccttgacaattgggctcactgctcatctctcagtgtggtcagacctgaatgaggatgcctgagtctatcttgttctagggcacctttctttctttttgtttgaacaactcagccaaataaaatcctagtttatctttagttttttttgttgttgttgtggttttgagacggagtttcgctcttgttgcccaggctggagtgcaatggcgcaatcttggctcactgcaacctccgcctcccgggttcaagtgattctcctgcctcagcctcccaaatagctgggattacaggcatgtgccaccacacctcacctggctaattttgtatttttagtaggggcagggtttctccatgttggtcaggctggtctcgaactcctgacctcaggtgatccacccgcctcagcctcccaaactgctgggattacaggcttgagccccaccgcgcccagcttatctttagttttttgtttgtttgttgagatagaatcttgctctgtcacccaggctggagtgcagtggtacgatctcagctctctgcaaccgctgcctccctggttcaagcaattttcctgcctcggcctcccaaatagctagaactcaggcacccgccaccctgctaatttttgtatttttagtagagacagggtttcaccatgttggccaggctggtctcgaactgctgacctcaagtgatccgcctgccccaacctcccaaagtggtgggattacaggcgtgagcgattgcgactggccggcaaggttttcttgaagtttgaattttcctttttggctgcctggtcatcctcattggtcttctgcttcttggtaacaatattgtcatcctgatcattttcagcagccagtttgccctcagcagcctcagcttcctcatctttatctccatcttcttcctcaccatcaacttcctcctcctcccccttcctctccactttcttcctcttctttttttttttaaattaaattaaattaaattaaattttattttatttttttgggacagagtctcgctctgtcgcccaggctgaagtgcagtgacacgatcttggctcactgcaagctccgcctcctgggttcaagtgattctcctgcctcagcctcccgagtagctgggactacaagcgcatgccaccacgcctggctaatttttttgtatttttagtagaaatgaggtttcaccattttagccaggatggtctcgatctcctgacctcatgatccggccacctcagcctcccaaagtgctaggattacaggcgtgagccaccacgcccagccctccaccttcttcccttctttgtctacctcatggtcagcctcctcctccccattgccctcattagtattcctgttagtaggggcatctctttcattgtccacctcctccacaacttcctccttctcctttaagtcttggtggtgatctaggagctggtgtgcacggctgcgtctgacatggggcacacaggtgatctgatgaaggggattaaaaagaaagtgagattcggggactggtgacaaagctgcctgccagaggtggctgcagtaagcagggagcctgatggcaaataatacaaagatggcttttcagagcagccagtgggggcttcagcacttctcatttgcttcccttttcacgtatatttcacaaatgttaactccccctgcaagaaccagacttctcggagtactcagcatcctctgtggcttgtatggtagctccacagaccccctcctggccccgctcacctctgagtgagcgtggttggtttgtgttgtcacctggataattaccatggctggcagcttcctggtagatgtagagtgctgggattatgggtgtgagccaccgtgcccagccccacactttattattattattattttttgagatgaagtttcactctgtcgcccaggctggagtgcagcggcacgatctcagttcactgcaacctctgcctcccaggttcaagcagtttcccctgcgtcagcctcccaagtagctgggattacaggtgtccaccactatgcccagctaatattttaatatatttagtagagacagggtttgtcatgttggtcaggttggtcttgaactcctgacctcaggtgaactgcccgcctcggcctcccaaagtgctgggattacaggaatgagccactacgcctgccccccaccccccacttctaaagcaccagatctcatgagaactcactcactatcatgagaacagcaaagggggaaatctgcccccatgagtcaatcacccccaccaggtccctccccaacattgggaattacaattcagcatgaaatttggatagggacacacaggcaaaccatatcaaggcccatgacccaagtttagccagtcagagtccttccctgggacttgcctaatccctggtcatgatgccgtacggcagtgaagctgcacccgtgtgaccagggccctcctcagggacacggccattctgagactcaagctgactcaccaggagtggcaacgacaacagaaggcccttcgaatagcaatgttcccatttagtggacatccccgacgtttttcctaaagcctccaccagcattagtttccttttctgtaaaatgcggatgacgacgttctgggaggctaaggtgcttgcccaagatttcaacatggcagagccaagattccaacacagagaggctgcctgcaaaccctgcagcctctgagctggcccgtgagatgctgcctgccacccattttggggagtcccctgccttagaccttgtccttggcccaggagaactgagggcatcctttgtatagctctgttttcatagtgggtgagggtgggcacatgtttggctgagcgtggggtgaacaatagacccggtgccaaggtttccaaagccctccctcccacccctcctctcgctccctcagggcagatgcatttggggtcactgtggaagctactctcatgaatacctgtgtgacaaagggctgcttcatagaagagaaagtctctttgcccaacactaagcccaacgccagttaaacagctgtaaagcacacccattccaaggaagcattaaagaaaaaaatcctgtatctcccacttaggtaggcacatcccagcgatgctggggcagagctgctaatggccaggggaatggctggcgcgtctctcaaaattggatcacactagctcctggctccatcagccagaacgggatggcgtgcactcccgagggggctccgcgaccctggagcagtgctggggggctctctggaggacaggaaggcccccgtgcgccagattttcagcaacatcaggatgtggagagagcccagctcaccacatccccttggcgaactgtgacaagaaacgcaccagctttcaacacagctcttgttctccatcaatgggttccattgtatgcacgaattccccagctctaggagttggttctgtgccctggccagagtctgaaaccaagggacctggtctcccccactcccttcctcagtgttgtgcagcatccgcaaaatctggtcaaagagcttcacctcggggagtgtcctttcacttctctctgtggaggagctgggagggtggagagccacaggaaccacttggccatccgtcctcggggcacttgagcctttgaggttttccccactggccccacctcactgccctccacttgatattccccattcaagtccaggccggagattggcaaactactacctgtggcccatcacttgttttcctaaataaagttttattggaacacagcccatgctcattgtttatacattgtttatggctgctttgtctttacaatggtagagttgagtactcatgacggagattgtacagttcacaaagcctaaaatatttactatctggtactttatttttatttttttgagacggagtctcgctctgttgcccaagctggagtgcagtggtgcgatttcggctcactgcaagctccgcctcccgggttcacgccgttctgctgcctcagccttccaagttgctgggactacaggcgcccgccaccgtgcctggctaatttttttgtattttgatagagatggggtttcaccgtgttagccaggatggtcttgatttcctgacctcgtgatccacccgcctcggattcccaaagtgctgggattacaggtgtgaaccactgtatctggtcctttaaagaaaaactttatcttcccatgatctaggtccaagaagaactacagagaatttaacttttggcatttccattttttggctcaattgactgattcattcattagacaaatatttcttgagaatctaatatgcattaagctctgagctaggtgctcaggatacagagatggacaaggcagacatgtatgtgcctgtccccaaggaaagcagaggagatggccactgtgcaagcagctcacacattgttagttacaattgtgctgagtgttacaaaagagagggtggtgtgctctgtggacccagccaaggggacagagacagcttcctggtgagagtaatttgtcagctgagaccttgaggatgagtaggagttagccaggtcaatgggctggggagagaggatggagactcctctagacagagagcccagcctgggccaggcaggacagagcatggctccctccaggagtagagtgaggtcctgggaggaaacatggaggttgagcttccagagatgagccgtcactctaccacgactggatctgatgagggactgggattgaccccttcttcctcaagacactgaggtttctattttccctatgcaaatctcagtcttcttcttcttttttttttttttgagatggagtttcgctcttgttgcctaggctggagtgcagtggtgcgatctcggctcactgcagtttccaccttcggtttcaaggattctcctgcctcagcctcctgagtagctggaattacaggcacctgctaccacgcccagctaatttttgtatttttagtagagtcggggtttcgccatgttgcccaggctggcctcaaacccctgacctcaggcgatctgcccgcctcggcctcccaaagtgctggtattacaggcatgaggcaccatgcccagccaaagctcagtcttaattcagatcaacatatagtttgtaaagtgggattgcccaatttggtagccactagccacgtgtggtaattgaaatctaaattaaaattaataaaaataaactttaaaatgttcagatctttggtcacactagtcatagtgcaagtgctcaagagccacagtgacacccctgtcggacagtgctgctggaggacatttccagcagagtagaacatttccctggacagcatggcctcaggaagggccccgccctgtcctccatcaagaagccaccatgtgaggacttgtctttcttttcttttctttttttttttttgagacaagagtttcgttcttgtcagccaggctggagtgcaatggtgcgatctcgactcaccacaacctccgcctcccgggttcaagcgattctcctgcctcagcctcccgagtagctgggattacaggcatgcgccaccatgcctgggtaattttgtattttttacaaatacaaaattaaagacggggtttctccatgttggtcaggctggtcttgaactcccgacctcaggtgatccgcccgcctcggcctcccaaagtgctgggattacaggcgtgagccaccccgcccggcctgaggacttgtctttcaaatggaaaaatagattctgggcattggggttttggatcttctgcccatgatcaagttgtgtgatcttgggcgagttacttaacttcttcaagcctcagtttcgccatctgcaatactggcccagagcaatgtttggtgtatgataggtagggctccctaaatggcagctgaaatagttttaacttttgtagtagagtgaaaaaaaaaaaaaagtacaaccttaacaatggcccctaggatctctattagagagaaaattgtttttgtttgtgagagcattgtgctaagttgctgttgggggaggctggactctgggggacgggatgtttgagtctgcactgggagatcaggaacctgtgtgttataggagcagggaggaggcagagaagtggcaggaggctgggaatcaggagggatggagtggatgtgtggcaggcactgaacatcctcattggcttgaactggagcttagttcttcatccgtccatccattcattcactcatagatccaacaggcctattttggctgcatgggtccaaaaacctaattgaaggaaagaattaatgacttacgtgacagaatcataagccagaggtgaatcaaatctggctttagggaaagctggatgcagggctctagctgaacaaaaggatgaggtttctctctcctctgtattggccccacattttcccatctcacaagatggcggccaggagctccagggccacatgggcttcctgattccagaagaaggaagcagcaagaaccttccggggatcccagtgtcagtctccttgtgagtctttgggttagactgggtcacgtgcttatccccgagctcatggaacagaacgatctgcttggctccggctctcaatattccgcatgggctgggccaaagaaataaaggaacaaaataactgaagggtcaacaaattgaggaaaccaaggaacatggagaaagctgagtggacgctgggtatggaacaagagatgtccaccataacgaattcactcaaccctctagggctgggctctgggggcaacagaaaacaagctgagccctcagcctgcatggagcttacgttctattggaaggaaacagcctcatcccgacggcccttctctccctcccctggggagactggagacagagcctcctctccctcctggtctgagtccagccccaggaaaggagtgaaattaactgtccattgttttagtgacacttcctgggagcaacaaagggcctttcacagtgagaaagtgaagcaagtagatgcgggatgacctggaagtcacagaatgtggttgtcgaggtgccagatggaaaatgcccaacaggtcatgttcagaaattggagctgaaacagacacactcttgaaaaaatatccatatatggttggcatttcagatgcactttgtgaagtcaaggacactaggctgggtactcagaaacaggaagcacctagaaggtcttggaaaaatcagtgagcaatgggatccaagttctctttcaggtccgccctcactcttctgggttcatgcagctgtggaccaagggagaactgaagcacctggcatgtggcctcagtccccatccctctccctgccatgcaaacccctctcaatggagaattctaggcagagggagtatcaagaaaatagacggtggaggcccggagcacggaagaatcaagggactaaaagcagagagcagagaggaggacggcaggcgggggatgggccgggctggtgagctgggacaaaacttagaggagtttggaagccaaggacatgagcctcttcattatcccgagagcccccagatgcttggtgagagtgaagctggggggcgggggtcagggggactgtgttcatctcctaaggctgccctaaaacaacagaaatctattctcacacttctggaggctacaagtcagaaaccaaggtgccggcagagccatgctgcctccaaagtccttccttgcctggtctggcttctggtggctcccatccatcctggcattcctcagtttgcacctgtgttgctctcgtctctgcctccatcttcaaatgggctttgtttgtgtatctctgtgtgtcctctcctcttcttataaggacaccactcactgggtttagtgtccgccctaatccaaaataacctcatcttaaccaattacgtctgggaagcccctattttcaaatagtcacattctgaggttctggtggacatgaattttggagggaacaccattccatcaatgacagtggccagttatgattttcacttggcaaaaaggactctagcagcataaagaaggcttgaaggaggccagtttggaatcaggagacagttaggaggcaggagagaggtggagggggcctaggccaggatggggatggcaggagagaagtggagggggcctaggccaggatgggaatggcaggagagaggtggaggaggcctaggccaggatggggatggcaggagagaggtggagggggcctaggccaggatggggatggcaggagagaggtggaggaggcctaggccaggatgggggtggtgacgagggaggaaagtacatggcattgaaagatgttgaggaaggaaaatccaaaggatgggtgggatgtggggcagagtgaaaggtggactgtgatgacaccacccaggccgagtgtggcggctcacacctgcaatctcaaaactttgggaggctgaggagggagggttgcttgaggccaggtgtttgagaccaacctgggcaacatagacttcacctctacaaaacaaaacaaaacaaaaaaccacaaaattagacatggggtgcgcgcctgtggtcccacctacatgggaggctgaggcaggagggttgttgagcccaggagctcaatgctgcagtgagctgtgatcatgccactgcactccagtctgggtgacacagtgagaccccgtctcaaacgggaaaaaaatggagactccccagatttctgggtggcttatcagccttatcttctgggaataaaatttggtgaggcttaggatatgatagaaaatagacaggcagaggcaaagaaagaaatgctctttaaaaagagagagaagaaagcctgagcttgctgacaccccacgagatttgcccatgagctgcaggagttcgcttggccactcctaaacctcttggctcagcgcgtgggcaccactcagaagctgatgacagccctccatagaataaataaccctccctgtgagctcattcttcaatcaggcccctcctcgtcactcactctggcccacggaccagggggattgctggggacatagccgaatgtagcatccggtggctcgggggccaggaccgctggcgcagtgatgagcctcctcctcctcgcttgctctctggggtcacagccagacacgggggcaggggcaggtcttcagggctagggtctctgacccaaaatgctgggagggtttcctccattgcagttcccttcggagctcctggcgactcagagataaagaccacagaggctgcccttgggctgcctgggtttgcctggaatctgggtgcatttcttggggctcccaggacacactaacatgaacttggtggcttagaacaacagaaacctattgccccacagttctggaggccagaagcctgaagtcagtatcattgtgctgaaatcatggtgtgggccgggctgcgctccctccggaggccccaggggaggccccttgcctggcctagcttctgatggttcctgatgtcacttgacttgtggccactgcaatcttcaaatcccacgtctccatctctccttctgccctcctcttcttagaatgcatgtgattgcagttagggcccccttggctaatccaggatcacccccatctccagctctttaaccacacctgcaatgatcctcttttagaaggtaacatttacaggttctggggattaggacctgctacgtcctgggggggcttttattctatttcctgcaaactccttcacttacaagctgtgtgggcaagacacttatcctccccgtgcctcagtttcctcatataaaaatagctgatactctgctttttgttttttatttttttaagacagagtcttgctctgttgcccaggctggaatgcagtgatgtgtgatgaccgctcactgcagccttgacctctcaggctcaagtgatcctcctgcctcagcccccggagtagctgggactataggtgcatgccatcatgcccagctccttttgtattgtttgcagagacaggatttcgccgtgttgcccagactggccttcaactcctgagtgcatagacctgcccacctcaacctcccacaggtgtgagccaccacacccagctgacgctccgctttttaacaaaagaacccacaatctctagctggccacaacgtcgttcaaatacagacagcattttccaggcccccttgcagcttcacaagaccacgtgcccaagtccagccaatgggacgtaagcaggggttgatgtgtagggcttctgggcagggtcctactcctttcctttcctcatttatgccatgatgtttagaggactgggaccgccatcttagaccatgaggtgaatttgggagtggaggccaacacgtcataggtttttatgaagattaaataagaggcgcacatggagccttgaggaggggcctgacacgcacacatgatccatgggggcttatttctctttccctaccgctccttcttccccctcttccccttcccccttcccctctacctcttttcttcctctcccctcctcctccccctcctttgttcctcccctcttcctcttcccactcccctcccggcttctcttcccccttttcctgtcttccttcctctccctctctttctgtccctccccttccatcccctctccctcctctccctcctctccctcctcctccccctttccctcctccttcccctcttcctcctctccttcctctccctcctcctcttcctcctctccctcctcctccccctttccctcctccttcccctcttcctcctctccttcctctccctcctcctctccctcctctccctcctcctccccctttccctcctccttcccctccccatcctcctctccttcccccacctcctctccctccctctcctcctcctctccctctccctcctcctcctctccctctcccccctcctctccctcctcctctcctcctttcccttctcctctctctcctccccttcctcctcctctcccttctcctcctcccctccctcctcctctcctccttgctgctgttttacttctgcgtctggggttgcagatcccacaggcaaccttgcggacagcatgcggcctctgacaagtgtttcaggggctccttgagcggtgtgtttacacacgccacacccacagcttgctttttttagtcattctttattagtaataaaaacaacgcattactaagcaagccactgcactgggcacttaacatgccttgtttccaaactctccagcaattactaggtaaaattattatattgaatcttgtgttatctttatgaaagtcatagctatcattccctaatttaaagatgaagatattgaggatcagagaggatgttgcccgttcacagtcccacagcttgttgtgttggaatcaggggtcaaaccaactcttacccttgacttgggcttccttccatggtaatgtatggagcccgcacagggaactggctctgtgttaataaatattggggttactaaggtgaaaaagatcaacctccaccttcgaggaattcctcatggaagggttatgctgcgctgggagactgtttggggtcaggtgcttgaggtggtttcctggagaagacatgatttgaacggagccacagagaatggatagggtgtgtatagacagaaaacggagtgagctgggagtggctgggaggctgtgagctggacatggctgggaggctgggggtgctggaaaatcaggaggtggacagtttgtcctggggtgaggatcttgagtctacacaaagtaatgcttcctccttttaatcagagattatgaatttctttctcttccaagaaagttttgctttgttttatttttttgacagggtctcactctgtcatcgaggctggagtgcagtggcatgataagggctcactgcagccttgacctcccagactcaagcgatccttctgcctcagtccccagagtagctgggactgcaggcgtgactgcaggcatgcaccaccacacccagctaattttttgtatttttagtagagatgaggttatgccatgttgcccaggctggtcttgagctcctggactcaagcaatctgcctgcctcagccccctcaaagtgcttggattacagacatgagacactgtgcccagccattctttaatttatgtaaatggaatgcatattcactgggaggaatgtggaatatacagacagtcacagagcaggcctctccaccggagacttcctgctgtcaggtcagcagcaggcgtggctcaccaccgggagcccttcccagcaccgggcaccctgctgttcactcgccactcacccctatattcccagacatgcaaactgatatactgtagatgggcacgaccctctgtgtcttcttgtaatattaaaaaaaaattgggggcccggtgcggtagctcacacctgtaatcccagcactttgggaaaccaaggtgggcagatcacttgaggccaggagtttgagaccagcctgggcaacatggtgaaaccccatctctactaaaaatacagagattagccaggtgtggtccatgcctatagtcccagctactcaggaggctgaggcaggagaatcacttgaacccaggaggcagaggttgcagtgagccaagatcgtgccactgcactccagcctgggcgacagagtgagactcggtctcaaaaaaaaaaaaaatttttttttttgagccaggcatggtggctcacacctgtaatcccagcactttgggaagctgaggtgggcggatcacttgagggcaggagttcagggccagcctgggcaacatggagaaacctcgtctctattaaaaatacaaaaattagccagacgtggtggtgtgtacctgtagtcccagctactcaggaggctgaggcgggaggatcacttgaacccgggagcagaggcagaggttgcagtgagccattgcactccagcttgggcgacagagtgaaaccctgttttgaaaaaaaaaaaaaaacaattttggccaggcgcggtggctcacgcctgtaatcccagcactttgggaggccgaggcgggtgaatcacaaggtcaggagatcgagaccatcctggctaacacagtgaaaccccgtgtctattaaaaaatacaaaaaaatgagccgggcgtggtggcggccgcctgtagtcccagctacttgggaggctgaggcgggagaatggtgtgaacccggggggcggagcttgcagtgagccgaaatcgtgccactgcactccagcctgggtgacggagcgagactccatctcaaaaaacaacaacaacaacaacaacaacaattttttttagagatacttgtagattcacatacaattgaaaagaataattcagggggggtctcctgtattcttcaccaagtttccccaaatggtaagttcgtgcataaccagagtgcagtatcacaatcaggaagtggacgtcgatacaagcctcccacccagttggatgcccccagttgttcctgcaggcgcttgtgtgtatttagtcctgtatcattttatcacacgtgtaggttggtgcgacccacaccacaggtcaagatgcgggacggttctgtcttagtcagtttgggctgctgtaacaaataacaccctagaccgggtggatacagcagtctgtatttacttctcacagttctggatgctgagaagtccaagatcaagctgctggcagacccagtatctatgacccagcaagatcacaatgtgcttaaccttggatccttggttggcagctatccaccctctggtcgtgtcctcaccaaggccagaaggaaaatcatctctctgctgtctcttgtaatcccaaatttgagggccccaccttcatgacctaatcacctctcaaaggccccacctcctaataccatccgaataccgtcacactgagaattaggcttgcatatgtgaatctgcgtgatggaagcgtgctgtttgtatcaagctccatcacatccacccctcatctgccctttctacagccacagtcgctttccattcctttccatcctgacagccactcatctgttctccacctctataattttgtcactaaaagaatattagataggctgagtgcagtggctcatgcctgtaatcccagcactttggaaggccaaggtgggcggatcgcctgaggtgaggagttcaagaccagcctggccaaatggtgaaaccccatctctactaaaaatataaaaattagccaggcatgatagcaggtgcctgtaatcccagctacttgggaggctgagatggaagaatagcttgaatccaggaggcggaggttgcagtgagctgagatagtaccaaggcactccagcctgggcgatagagcaagactccatctcaaaaacaaaaacgaaaacaaaacaaacacacacacacaaaaacaaacaaaagaatgttagataaatggaattatacatcatagaatcttttcagatttttttttacacagcagaatgcccttgggtctccatgtaattttgcgttctatagcgtgaggattgtattcaagtacacagcgagatcacaatgtgtttaactccctcctgctgtgtaggttattttcacttaaacattattttgaattatgctgtggcaaatatccttgaagctgagtatacacttgtataataaggatttatttcttaagacaggttccttgcactggacttgctgggtcagtggtctcgccagattttaaaggcatttcacctaattgcccactacaagcaaggttctcatttttacccctccagctggtgagggagacattttggctccctacatccttgcatcctttcttaaggagaaaactcctgtcccctgaagctcatctcaggcccaggactgctaagagtggacagaaaggggaagagagcagaggagccacttgagcatcagtgagagaggggacggggcctgctctctggccgggctctgcagcacagggtcccagtttagatggagaattatgtgacaaccctaccgataggacatggggaaggagtagacccttctctgccttctccttctcagcctcctggacctcttatttcacttaaaagacatcatcacagtgcaggggtcacaggcatagacagggggccggacagctcgcagaaatggtgatggaaggaaaacatgcccccactcctttctcccgagacactcagccctcttctccagcgctctgcctccctccccaggctttcacagaggcaagagcactgcgagaaagtctctttccccttcaccaggaccgcccagacatgctccagcttcagggcctttgtctctgccggtccctccagctggtgggctcttcccgtgctcacccctccccttctgcaggttttccccagcgccaccttcccagtgaggccttccttccttacccgcccacagcactcttaacccattttcctgctgaaattttcctgttagcgtttatcaccagccacaagctatgcattttatgtattcatatatatttgcaatctgtttttttctgtttttgctgtcttgttccatgctttattctcagtgccaagaacaatgcctgatgtgcaggaagcactcaaaatgtcttattgaatgaatgagtgaatgaatcaacccatgaatgggtggatgaaagaccagacaaataaacagtgaatggaagcagtagaaggaaggaaggaaggaaagaaaaaagaaaaagaaagaagggagaaagagagaaaaaagaaaagaaaaaagggaaggaagaaaataaaggaaaataaaaaaagaaagaaagggaaaatggaaagaaagaaaaataaaggaaggagggaaggaaggaaacaaagaaaggaaaaaaggaaagaaagaaaaataaagaaacgaaggagggaaggaaggaaagaatgaaagaaagagaaggaagaaagaaggaaagaaagaaaaaggaaaaaaggaaagaaagaaaaataaatgaaggagggaaggaaggaaagaaagaagggaaaaaagaaaaataaatgaaggagggaaagaaggaagaaaaaataaaagaaagagaaagaaggaaggaagggagggaggaagaaagaaaaaaagaaagaaagaaaaaaggaaggaagaaagaaagaactctaccataagcaaagctgtcctggcatatgtggcatctggcaggcagcaagtctagactggggaacaaaagggactgttgaggcctggggtaaaccaatgtgttttggtctacagcgggcacctgccatcccactccagcccacggctacttggtcttcagtttttcaggactgagcagaaaaatctcaacttacattagcataaccatctaaagttgccagtatttgatcatttcttaacccacagaaatagtaatcccatgtgattcaaacttaatgcgcaattccttccaacttaaattgttgccaataaattaatagtaacaacaccattaacagtaacccactgactgcttgggccaaagggacacatctgtgaggtggggtcctcccagggccactgctttgcaagctccacagaggcctggagcagccagttgccatcccccaaagccaaatgcggagccctgctttgggccaggagcttggtctagccacctgtgtgcagagaggagctgggctggcaggcacgagaggtggtgatgtgcgacatgcagggtgaatccctcctccaggggtgggggctcaggttcttgaccagcgagagacccggcctctccctgctggagccccaggtgccaactgcaagcccttgcaaggagcacccatctcagcgagaggctctgcccccagcggatctccgggagccagcaagaggcaggtatcacctttgccaggcccagactcagccagttttgctcccggggctgtgatttcatcaggtggcgagagcttgtcagcactggtgctgcgtgtagtcagatggatgcacagatgtttgaaactcggaaaggtgctaaagaggcttctgggcaattaagggagttgggagaagaagaatcttctagcagtaaaacaaccagtcacccagcaccataaggggccttgacgggactgaaaagtgggcctatccatgtgaagggctgcgtttcaggcatgagccttccctcacagcatcatgacggggctcactacccagggcccagcccaaggggttcaagtctccccttcaagggcaagtagggaggctccccctccccaccctgctgagcattccaggatctcccatcccctttgggtttgacataggtcccaggtgctgacagttcattctgttgttcattccccgactgtctcattcattcagaagcacatgtacattaaacatctaccacaagggatccttaagggaacaggagacaaagctctggtcttctggctcccgcatttgagtggggcggatggcagacagtaaacaagtggatatgccatatgaggtggggagttgtgggaagtttttctccaagagaaggcggggtggtcagtgggagagagttctgggctgactttgcacatgcaaaaaatagtcacactcagtgcacacatgcaacacacacacagagaaagaaggagagggagtcagaaaacctatagggaatctcttaattttacattcatggaagttggccacattctaaataaccacattttattccatggcttcatatgatctttttcttttctttcttttttttttttttttttttgagatgaagttttgctcttgttgcccaggctggagtgcaatggcgcaatcttggctcaccatgacctccacttcctggggttcaaacgattctcctgcctcagcctcctgagtagctgggactataggcatgcgccaccatgcctggctaatttttattttattagtagagatggagtttcaccaggtcggccaggctggtctcaaactcctgacctcaggtgatccacccgccttggcctcccaaagtgttaggattacaggcatgagccaccatgcccggcctcatatggtttttattttgatggatgtaaacactctgagttcctagggcctcagtcaaggcccactcatcaagcccttccctggaggtgcccatctgggactttctggaataagattccagccaccagcccatccaggaaaccccgcgcgcctccctcgggccgccttcactcctctgcagccctcgtgtcttgtgctgtagacctggaaggtccatacacatcaaagcccaagttgctcaaaaccaaaccctgggctcctgttctagatgttgaatcggggtatgctcaagggtcagccgctgctacaggccagggaaagtgtttgcctttcgatgggtgtttgtgggtgtgagggggagctgtccttccctctcatcaaagattggagttttctaatgcaagaaagaaaaaggaaggagagaaaatcatttaggcatcacattaaacagggacataacagaggttaataatatagggcctggtgggccaggcgcagtggctcacgcctgtaatcctagaactttgggaggccgaggtgggtggatcacttgagcccaggagttcaagaccagcctggagaacatgaagaaaccttgtctctacaaaaaatacaaaaataaaaaaagagtagaggggctggagcctgtgcacctggcttcagatcccagacccactttctattaggttggtgcaaaagtaataacagatttttacattactttcaatggcaaaaactgcaattacttttgcaccaacctaatagctgtgtgttttggactccttacctaacctctctgtgcctgggtttcttaaactgtaaacaggagataacgatagtctccaccttatgggttgctgtgagacgtaaatgggtgaacacatgtgcactatttaagacagtgtctggcatatagaagcccccagtaaatgtcaatttgattatttcaatcaagtggagaagacatgtgaagcagtaaatgtctgattccatacctgtggcaggatggcagccacctgttgtgacccaagccctgcactgtttgtccagccttcaccatatagctgtccccatctggcagatgaggaagctgagccttggagctggtcagaggcttagacggggtcccgaagcttgaagggtgggactgaggttcaagccaggattgtgtgacttgaaagtcgatgtccttttcttctgggcaccactgaaggttggactggcttggcccagactgccttcccttttgacagggtagttcgtcaagccatattttctgagcactgctgtgggccaggcactatgagcaagacacagtggcctggagggctgtccgcgtgatttgtgaggctccttgttcaaacattaagactttcttttctttctttttttttgtttttctttgtttcttgtttttttggtttttatttttttgagacggagtctcgctcagtctccaaggctggagtgcagtgatgcaatctcggctcactgcaacctctgcctcccgggttcaagcgattcccctgcctcagcctcttgagtagctgggactatgggcacatgccaccacgcctggctaattttttgtatttttagtagagacggggtttcacagtgttagccaggatggtctcgatctcctgacctcgtgatccgccctccttggcctcccaaagtgctgggattacgtgtatgagccacccaccgcgccaggccaaatattcagactttcaagaaagcagagcattgaatgcagtgcagggcccttacgaatgcggggccacatgccgcttgccaggtctcacgaccatgaggccggccctgtctgcctgcgtgatgcttgggtatgtgtgtgtcttttgggggctatgataccatcagtaaggtaaggaagacatgatattaagtttttttgtttgttgtttttttgagacagagtctcactctgtcgcctaggctggagtgcagtggcacaatctcggctcactgcaacctccccttcccaggttcaagcaattctcctgcctcagcctcccgagtagctgggactacaggtgtgcgccaccatgcctggctaattttttgtatttttagtagagatggggtttcaccgtgttggccaggctggtctcgaacttctgacctcaggtgatccacccacctcagcctcccaaagtgctgggattacaggcgtgagcagctgtgcccagctgaggaagacataatattaatattgatactcaaaccaagacagcacaacaagcgctataaagggaggccctaggctttgtgcagaagccacaaagaaacacacaccttgcttagtctgagattctttgcttgaaaatgaattctcatggggaattttctgcaacccaggacacttttagaggaattcagaaacatttaccgagagctgcgtgtgttttaggtgctgagagatgatgctgaagccaaaagaggcatggtctgtgtgatgcttaatactgagtgtcgacttgattggattgaagggtgcactattgatcctgggagtgtctgtgagtgttaactcagattaacatttgagtcagtgagctggggaaggcagagccacccttaatcgggtgggcaccacctaatcagctgccagggaacataaagcaggcagaaaaaatgtgaaaagagagcatggcctagcctcccagcctacatctttctccagtgctggatgcttcctgcccttggacatcggactccaggttcttcagttttggaactcagactggctttccttgctccgcagcctgcagatggcctattgtgggaccttgtgattgcgtaagttaatacttaataaactcctatatatatcctattagttctgtccctctaagagaaccctaatacagtctgtctcctgcagctcatggtctaactgggagacagatgataggcattaaccaaatgatccgatgaatggatgagcaggtacaggtgtgataagtgtggggccagggagagaaggggtgctctggttgcttttaaaaaggggctttgacccagtttgccagggatgtctttgctggggggagcgccaaagcttgagcagactttgaccagatgcaaagcagagagaacagtgtcccaggcagaaggccgatgtgtgccaaagcccagagggggacagaggagcctcaggccagcatgacagtgccctgtgagggaggggcagggaggtgggagaggaaatgctgaggtcccagggctagattaaaaaaatgccgcctatgggccaggtgcagtggctcacgcctgtaatcccagcactttgggaggcctaggcaggtgaatcacccgaggttgggagttcgagaccatcctggccaatacggtgaaaccctgtctctactaaaaatacaaaaattagccaggcatggtggcaggtgcccataatcccagctactcgggaggctgaggcacgagaatcgcttgaacccagaaggcggaggttgcagtgagtcaagattgtgccactgcactccagcctgggcgacagagacagactccatctcaaaaaacaaacaaacaaaaactgtcacctacagccactcaaagatttcatcctcggagcactgtaaagccagtgaccgagtttagcaggaattaactgacgcaatcagtgttctgaagaggtcactctattctcttctgccgccttccctcccgtcctacccactgggaccctcggactggttccaaggagcagagaggctgagatttaccacgacgtgacagaaagggctgtcatttcatttgagccagcctgctgcacaatgattgtcatcttgccaattaccatcctgtttccaaaagcactttattgctggaggaatgaatggggctcgatatggccttatataacagttggacttccctcgccggcttgaaaacagagctcctgtcagactatcagcccataagagcatgccttggatctgataaacagacgttggcaaatgggaggttggaaggtggtgccaagctctgtggtttggactggtcctatgagcgaaacaatcgaagcagctaaccatctgcaggagggaaaagaggaagggaaactcagcctgagacacaaagaggaagtgtgggagacagaggggccgcagtggacgaggtcccagtcccagccccgttactacagccttgcagactactgcctgcccaccagcaggatgccacgtttgtagggcgagtagacgttctgttgatttcactaaccttccttcctgtggtgcctccttcaggaataaaggggtggatgaggttgcaaggatggagatgggaaggaagattggtggacaattttgtagagagcttttgcggatgatgagttgcccttcgtacttgctgatgttcacttacaagctgtaaagcctttactgctgttgccattggatggttttggactgagctaggcacattctcttgcacagggctacttgagaccatggccaacttgtcagaggcttggctgcaagtctaccctgctggcctgttaggagttcagggaaccacacagagaccccacttgggcatacttataggacaacatctatcatttggatggacagcggacagagacaagatctgctcaaccaaatccacttccccagcttttatcatgtaggccactgttaggcatgtattctcttaaatgcagcccaaagcatccccagtgaatacaccagagggccccctgaatattcttgccaaagcctttgagtgtgcaaggccttgagccagcaagtgagaattccattccttgtgttatgctgccttggtggaagcagtgctgtttggctcttgatacaatgcatggtttagagaagcagctcttcagattttattcctggagccctcttctttttaagaccgatcatgtggctagagcaggcttctctgcctgggcactgttgaccttaagggcgagatcatttcatgttgtggaattatgttccatgtggtggggcatccctgtcttccactcactagatgccagtaacactctcccctagttgtgacaaccaaaaatgtccccaggaggcagaactgtttcctgttgagaacctttggactagaggaataatctggaatcagatttgtatacagtctaccaaaattctgagcgtccttctctcctgacctgcctgtttctttacctgtgtcaagactgccatgcgatcttggttacatcctcattcacagctaggatgactgtcacaggactctcatgcagagggagggccatcttcctacggcctcattggttttccagaaacgcttgagcaaattccgggtcactgctgggcagaagtgaggacttgagaaagtattcagacagctgcttccgagctcctctcacagttagactgagatggaggacagctgagaggctcagtaatgtccatggatttggccccaaattggctatggagagtaggttggaagtttaaaaaacaataatagattttcttttctttttagacagagtctcattctgttgcccaagctggagtgcagtggtgcgatctcatgtctgagtctccccagtagctgggattacaggcgtgtgccactatgcccagctaatttttgtatttttagtagagatggggttttgccatgctggcctcaagaaatccacccgcctcagcctcccgaagtgctgggattataggcatgagccactgtgcccagacaataatataatttcttgttagaggccgtcactcctggatttgagatgagttaggtgtcaaaaccggaagtggagatttggtagagtgaagaggcatttccagcacccaaatgggccttgagaatcaagagacctcattgcaaggaaatggtcttggatgggaagtgcaggccctgccaccggtgtggctcactctccccacaacgccaaacagcagcccagtctcaacgggggaacctgggtgtgttggggtttttgtctaacatcttggaatgattcattcatcttctgctctcaatcaaatccactggccttgttgaagaccttcccatcatcacagaaccctgttttgtataaaataaattggaaccactggcattgaatggagcaaaaaatagaactctgtgagaaatacttgctgtccagtaagccgggggcggcttttctttaccaatgcctccttccctttgaaaacaggaagtcaccatggccaaaagtaaatgagtttccagccggctgggtcaaaatccagactccacctcccactcccacctgtgggctccatgtcaacctgcccaactttctctttgggtcttgacaccagcggctgactaagcccctgtcaacgcagccctcctctttgatctgaactttctggcactgtctctgttcttgttcagagggaagcttccatcttcctcctcatgtctcctcttggccccctttcctaatccttggagtgcaggcaaaactctgaatgtgttttttcctcagataaattgtaaaaaggggcaggtgccagagctgtccagccagcactcagtattcttacccaccctggcttagggttgaagaggagaactgtctgaattcttcatacaggtctctgacctaagacatttcatgaggtttgtttaattacaggagagtgaaaaccctatgcaaactttctttttcttttcttttttctttttttttttttttgagatggagtctcgctctgtcacccaggctggagtgcagtggtgtaatctcagctcatggcaacctctgcctcccaggttcaagtgattctcctgcctcagcctcccaagtggccgggaccacaggcgtgtgctaccatacctggctaattttttgtatttttagtagagatggggtttcaccgtgttagccaggatggtcttgatctcctgacctcgtgatacacttgcctcagcctcccaaactgctgggattacaggtgtcagccaccgcacccggccacaaactttcttagataaacaaagaaatttattgacttatgtggttgaaaaggccagtggcttcaggcacggctggatccaggggctgaaggatgccatccggaatcattctctatttctctctctcttttttctggagacagggtcttactttggcccccaggcaggagtgcagtggcacaatcacagctcactgcagccttgacctcctgggttcaagcaatccctgcctcagtcccccaagcagctgggaatacaggcatgctccaccatgccctgttaatttttgtatatattttagagatgagattttgtcgtgttacccatgctagcctcgaacttctgagctcaagcgatttgcctgcctcagcttcccaaagtgctgggaatccaggcatgaaccaccatgcccagccattctctatctctcaatattgctttcctctcctggctttcttctaaggcagattgtgccctgtgaaaccctgaccaccaactttcagcttacaccctatcactgtagaaagtccaggcaaaatgcacattggacaggcaaaaatggtggtgctgctgctggtcactacccagacaatagatgtcatgcagctgcctgtgcttgttttgttttaaaatttctctttatgttttctggtccttctcaaactttgaacagtgaacatgggcttagtcagagatatattggttacaaacagcagacacctactcaaactagcttaagcactaaatactttctttttccagggatttaatggtcacttgggaaatcaagggcaggtagtgaggcctgactttgtggagattgtcagaggaaatcaggaatccattaagaatcagcactgtcatctcactttctcttcatgatcattcgcctctgatcatcctccggcattagatccagtcttcctctctgtctgattgttttgcttttctatgctggtgagaggacgcctcttaaacaggtacccagaggtagaggtggcgcttgggcttccgggtacctcttgctgggatcttaactcactgcaacctctgcctcctgagttgaagctgttctcgtgcctcagcctccagaacagctgggaccaaaagtgtgtgtggcaccacaccaagctaatttttttgtattttttagtagagatgggttttcgccatgttggccaggctggtctcaaactcctgacctcaagtgatccgcccaactcggcctcccaaggtgctgggattataggtgtgagccactatgcccagactagagtacttgtttaccaggtatttgaagactaaacagacaacagattaataaccaaaacagcaggtgtaattttataaatagaaaaattaaagatcatagaattagcagtaccaatggcttaaataaaaatcctaggccagcacggtgaaaccctgtctctactaaaaatacaaaaattagccgagcatggtggcaggtgcctgtaatcccagctactccggaggctgaagcaggagaatcgcttgaacctgggaggcacaggttgcagtgagctgagatcgcaccactgcactccagcctgggcgacagagtgagactccatctccaaaataaataaataaataaataaaaatcctagatagatgataagaattactgatgaaaaataaattaaaatatttttccttcaagcagataaaaaacatactagacaaatcacaagatttactacttttaaaatcttatttaaattttagaatagttttacatttacagaaaaattgcaaatatagtacagagtttctataggccccacaatccggcttcttctattatgaacttcttacgttactattgcatattgtcataattaataaactaatactgatggatttttattaactaaagcccatacttgatagacatttccttagttttccccgtgttgtttccctactccaggatacgacatgacattgagtcatcctgtctccttatgctcttcttggctgcggcagtttcttagactttctttgtttttgatgaccttgatggtgggaggccaaggtgggtggatcatctcaggtcaggagttcgaaaccagcctggccaacacggtgaaacaccctctctactaaaaaaaaaaaaaaaaaaaaattagccgggtgtggtggtgagcacctgtagtcccaggtacttgggaggctgaggcaggagaatctcttgaacctgggaggtgaaggctgcagtgagctgagattgcgtcactgcactccagcctgagccacacagagtgagactccatttaaaaaaaaaaagatgttttgtaaaacatacctcaattagaatttgtcggatgttattttcaccaaacagactgagtttaggggaggaagatcacaaaggtgaagccccttctcatcacatcctatcaaaaaagtacgcactgtcaacacgagttatcactgttgatgttgaccttgataccctggctgtggttgaggttgtgtttgccaggtttctccactttaaagttacctttttccctttcttacttcttaaatcaacccctttcttaacctattgtgtttattcgtccacatagtgtctctgcacttgatgcatgactctgcatttgatgcaagaagggaaatagaatgtcataccgttgtcataccattgaaatgcatttttcaagaccatcccgaccaagatggtgaaactctgtctctattaaaaatacaaaaattggccgggcgcggtggctcacgcctgtaatcccagcactttgggaggctgaggcgggcggatcatgaggtcaggagatggagaccatcctggctaacacggtgaaaccctgtctctactaaaaatataaaaaattagccgggcgtggtggcgggcgcctgtagtcccagctactcagagtctgaggcaggagaatggcatgaacccgggaggcggagcttgcagtgattcgagatcgtgccactgcactcctgcctggggggcagagcgagactccatctcaaaaacaaaaacaaaaacaaaaacaaaaacaaaaacaaaaacaaaacaacaattagccaggcatggtggcgcaaactatagtccccgctgaggcaggagaatcgcttgaacctgggaggtggaggttgcagtgagccaagatcacaccactgcactccagcatgggtgacagagagactttgtcacaaaaaaaaagaaagaaattcatttacagcagagtttttttgtttaaaaaaaaattccccttttcaaaatatgtggttttctcaagggacgagagcattctgtctaaagcactgttgccctcaaaaagaaagactggaatgagctttggtttcttttccattgtgacaattcccagatttgaataattcaccacaagcgtagatctctcccaagtctccagttttcaaagcactttgaatttgtggaaaaacagagttatccggatggttggggctggcagttctctgggggacaaagtgtgctatagaaatacatgattgcctaaagaaactgctttgtaagcctccctacaagataagagaaacttttttttttttctccgagatggagtcttgctctgatgcccaggctggagtgcagcagcaccatctcagctcactgcaagttctgcctcccaggctcaagtgattctcctgcctcaacctcccaagtagctgggactacagccatctaccaccacgcctggctaatttttgtatttttagtagagacgggggttcaccatgttggctaggctggtctcgaactcctgacctcgtgatccgcctgtcttggcctcccaaagtgctggggttacagatatgagccaccgtgtccagccagataagaggagctttttttttttaacaaacaaacaatcctgcacccaactgctctgtgttggatttaagacttaatttagattattatttacaaatttccagagtcaagtatatttcattttttatcagtaattcttatcatttatctaggatttttacttgaaccactggtaatgctgattctatgatctttaatttttcctatttataaaacacctctgtgcccccaacaacttcatcattgtttttctttttttcccctcaagctattttggagctaaataaaaatttaacattcgggccgggcgcggtggctcacgcctgtaatcccagcactttgggatgcccaggagggtgaatcacgaggtcaggagttcgagaccatcctggccaacatggtgaaaccccgtctctactaaagatacaaaaaattagctgggcgtggtggcgggtgcctgtaatcccaggtacttgggaggctgaggcaggagaatggcgtgaacccgggaggcggaggtttcaggttacatttttcatatatggcagccaacctgctttgctaaagctgccaaatatttcatgtctaaaaagggaaataaaagacactttgaggtataaggaagtagaggactagatgaaggataatgccgttttgaagggtgtgtttatggaaggaaaatattgtgtatttttgggtgtttggaaagccccagaatggtggattttactaatagaagtttgttgccctgctcatgagctactttgcttctgtaggtatccaccaagctcccaagtgggctagcacatagtgcaggctgaagagtgagcaggatgagtgagcccacgtcttatctctgcaggatcctcttcttacacattgacttcatcagcaggcttctggtgaaagacagtgatggcaagtgactgaaatccaagatgatgatccattggcttcccccaaatcaaggaggggccaactaaccaagccacgagaggcatgacactgctgctgggcctcacgaatggtctggaaccaagggatgggtcggtgatattcttctggcagaaaaggcgggcatcaacttgcacaaggtagacctctcattggctcagcttgggtcaggtgactgctcctggactacgggattggttcatctggaaaccgggctgccataggaaccatagggtccagaggggcggggtattaacaggaaaactaggagttccgttttcagaggaaggagagtggtctgggcagacaaaactgttaaggtccatgacactaacttaatgatgagcatataagtagaaagttatagatgtcgccacgtctggtgttttctcagtttttttcctagagaggaaagtaaacatattattctgttttaataggttgccaggtggcccatcctataatcccatatcctcacgttctgttaatatgttggtatttttccttctagtcttttcttttctccaccccccactccaggctatggtttcttaggctgccggtttttgctttgcatgaagctagactgacttttgggttcttagctaacttccaaatctgtgagcttttttcaaatgaagttggaatagtctccctagccagctatattgacaggaaactaggtgaaaagatctttgaataaattgtttgtctctgcttgccaattctagtgaatcttgaaatatgactctcaaagagaccattgaaaatgacctggaaactttggccacttggtcccatgaaatagagggcccccaaagtttggtataacaaaatcacttccaaattttaacctagacattacaggctggaaggactgcaggccaaatgtgacccagatgtgttctgtttgcctcatacagctaaaaaatttcaaattaattaccaacctttgaaatcaagagcttttatctgaattttgatcttctctctagatatggggagatgtggccgtgcctggtcagccttcctgaaccacacattggctggattgctgtgggtggggcagactttgttgctacagaaccccagaccccgctgttacccactggagttatttacaaggcctgccggatgcctgtacgtcagtggcttcaatccggccactctcattggcttgctgctcctggagttgcccatgctgagaaccgttctgttccacccagccagcagccagtggaaatttcctgacccctcctgggcctgaagccccagagccaggaccggacctttgtggatactgatggctggagaaaatgtctgtaagactctcagtagagaaatgctaggtgcaaaactgcacagggcctatcatcctagggtaatttagaaatacgtgcatataaaattatccctatcttgatgtttctgtttgggttgttacctctgttccctgatcttcatatctacaccaacattttaacaatgtagaattccggtacatgtgcatttcacttctaatttacatacactccaaagaattttccaaaaatgttctcattgcatattttgcttatgtatatacactcttcagcgtgcatgccctccactcccatgccttagccacacctcatccctagtggacaggaacccatttccacgcccagctgttatctatactttatcctgcacaggttgtacacacaaaccctgcttactgcattttgtgcatgatttatgggattttcaagagtaattctgaccacgcccagttctttttaagtgcactgattgagaactcaaggtaattcttggggagatagggcaagaagaccagaaaccaggaagaaggcaggaaaaagacaagatctgggtctgcgtgggacttccattctaggaagtgggagttttcagctgagcatagcaaggatttgaatctgggcttgcgaggtccagaggcatttgcatacttccctagcgttgatgaattgagctaactcacacacaccaggtatccacacatcttggaaccagatagtagatgggaaaacatggaaacacggcataaacacaggaaacaatgagaggttaacagtgtattttttgcttgttatctgtgtgacctaaagcatgtattgaacctctctgatatcactttgcttgggtcatgtaatgggcccattatagtgggttccttatgtggttgtggtgttcatggagattagaaatagcaataacacccaccatttattgggcattaaaaaaatatatatatatataatatattaatatatatgtgtatatatatatattatatatattttttatatatatgtatattttgagacagggtctcactctgtttcccaggcaggagtgcagtggtgtgatctcagctcgctgcagtctccaactcctgggttcaagtgattctagaggcatgtattatatttcaggtaatgtgctcaatattttatatccatgatatcacttcatcctctcaatcatacaagggataggtaccatcactatctccattttacagacaagcaaactgaggctcagagggttttttttttttgacagagtttcgctcttgttgcccaggctggagtgcaatggcacaatcttggctcatcacaacttcagtctcctgagtagctgggattccaggcactcaccactatgcccggctaattttttttgtattttcagtagagatggggtttcaccatgttggccaggctggtctcaaactcctgacctcaagtgatctgcctgcctcggccttcctaagtgctgggattacaggcataagccagcgtgcctagtttaaaaaaaaaacactttttttctttcttttttctctttttttctgagacggagtttcactcttgttgcccaggctagagtgcaatggcatgatcttggctcactgcaacctccgcctcctgggttcaagcgattctcctgcctcagcctcccgagtagctgggattacaggtgcccaccactgcacctggctaattttttatatttttagtagagatggggtttcaccatgttggccaggctggtctcgaactcctgacctcaggtgatccacctgccttagtctctcaaagtgctgggtttacaggcgtgagtcactgcacccagccaaacaaacaaacaaacaaaaaaccactttttaaatctaaaatttaaaaaatatatatttttagtttattttttaatattaaaattttttgtagaaatggggtctcactatgttgtccaggctggtctcaaactcctggcctcaagtgatcctcctgcgtgagactcccaaaatgctggggttacagatgtgagccaccatgcccagtcaatcccttggcaatttaaaaaattaaaatatttaggaagtccaaatttattttttactttttagataacatacagaaatagaacctctgatcatttttgatgaccttcaaaaaaatatttgctttcccaaagcctgctttctcatctgtagagataataatggcccaacttcacatcattgttgtgaaatttaaaaaataatgtcagtgaattacttactgcaataagagtgcaatcaaagttaagtcattatgaggtcaacgttgtaaattttatttatatttacctgcttgttttacaaaatggagccatacttcctatgctgtttgctaccttgccttcttttttaaaaaatgtaacagcatatggtgacattagtatataatcatcagtgtcatttataataattgccatatattttgctgtgtggatttttgatagttattaaacaaaacccctattgatgggcattttggttgtttgaatctttcccattcttacaggtttaggagacctttaattatgttttagggtaaattcctacccaggggaaccttttcttcctaccccaccctggcgtttctggctcctccactctgggaaggcacagaaggtttgtttgaaattgacaaagaaatctaggctggggactgtggggtgtggaggtgggggcaggggatgggacttggggattttgctggtggcccaggtaaaatcagataaggaggccgattatgcatgctgatagaggcccagatagccaccggtttacaaaatccttcttgcagatcgttttaaagatgcccttcttttgtgattttaatatgtcctgactccacccaccactgaagctattcccaggttgatacctgcgaagagccagagaaccagtgcccatctctttatctctttctctctggttttcattcctcgtctattttcattccaccaaataggtttggtttttaagcttttcctcaggaaaatgaaatacaagatgcagatttttttttttttttttttttttttttttgagacagagtctcgcgtctcgctctgtcacccaggctggagtataatggtgcgacctcggcttaactgcaacctccgcttcccaggttcaagtgattctcctgcctcagcctcccgaatagctgggattacaagcgcctgccaccatgcccagctaatttttgtattttttagtagagatggggtttcaccatgttggccaggctggtcttgaactcctgacctcaagtgatccacttgcctcggcctcccaaggtgctgggattacaggcatgagccaccacgcctggccaagatgcagattttttgttgtttggatgcaaaagcacagctttggggaaaaaaaaaacccaaaaaactgatggaggcactttcttaagcagattggaggccctgcaccctgctaggggctgggtccccaccctggaagcctatatttagatatctgagagtgaaacaggagggaaagaaacaaaatgaagaaaacttctgtaagcctcagtttcctcgtgcaaaatgtggacgttaatagtatctccttacctcggggtcaccacggtattggataaaataatgccagtaaaaggtgtcccagtatcagagaagatggccattactcaaaggcttgctctagcaaatgtcaagctacagacagaaatcagcgctctcaaggagagcttgagggtgagattttggtctagatttgggcatggcagtggcagtcgggagaggcttccctggggaggcagccaggcctgcaaacggtgtttatcgttctctccatctggcattagggccagagcactactgtctctctgttcccccaacacgacgcgctgccagcacccacactgctgcagagccttagcacaggctgcttgctccgctggatcacacccaaaccatggcctggctggctccttgttgactttcaattctgagatgaatgatcatctccctggaaaaggctctgccactctccaatgacccagctctggtttatcttcaccgtgctgatcgcccctgcaatctgtttgctttcagctcttggacctgttcttccctacccacccaggtgcgcttggtgctgtgtgcacagtaggtgctcggtcaatatttgtccagggcataacacgccttccagcagtgtggctccagctccgagggcatattcatcatcgggggatcttgttagaatcaagggtccagttcagtaggtctggagtggggcccaggagtctaagtgtctgagaagcttccaggtattgtgatgctgcaggtaggtgggccgtgctttggggttcaagagtgtgtgaatgggacagctgcgacctggggcgtcaacagagggaggggctggttgaaacagggaggggcttcattgaggaggagaccctgatatttaagtaatggaatttgtctcccccacccccacccccacccccaccatcccttcatccctgctgccattatttctcagccacgttattttttttttttgagacacagtctcgctctgtcgcccagcctggagtgccatggcgcgatcttggctcactgcaacctctgcctcctgcgttcaagtgattatcccgtctcagcctccggagtagctgggattacaggcatacaccaccacacccggctaatttttgtatttttggtagagacggggtttcaccgtgttggccaggctggtctcgaactcctgaccccaagtgacccacctgccatggtcccccaaagtgctgggattgcaggcgtgaaccaccgcgcctggcctctcagccacattattgatctgctcatcatgtcctccttccccccgatcattgtccccaagctaacctgagcttcctaaagcccacagagagcttgccatggcctcgggaacactcagactcttgcctactcctccagcctggcgctaaagaggcaccccccacaaaaaatttgctgaataaaggactgagtgatgtcattgggccacaattgactcctggggctctcttgtcccttcaactccacctctcatctgcatgtgtgaacctcccagttggactggaaaaaggtttagctcctctctttatcctgcaaggaagctctgcaggaaactctccaagaggacaataagcccccttgcctttgcaaaaacattttaatacctgttattttcagctgagtcccgcacagatcggcagcaccggttttgaaggccacgtgtactccaggtaaggaggatgcaggtgcaggggccaactgcctgtgcttgttcccttacacacttgttgttttaacttctttgtgcttcgattttcccatctgtgtaatggggataataaaatgtacctccaggccgggcgtggtggctcaagcctataatcccagcactttgggaggtcgaggcaggaggatcacctgaggtcaggagttaggggacagactggccaatatggcgaaaccccgtctctactaaaaatacaaaaattagccaggcgtggtggctcatgcctgtaatcccagctactcaggaggctgaggcaggagaatcacttgaacttgggaggcggacgttgcagtgagccgagatcgtgccactgcactccagcctgggtgacagagcgagactgtctcaaaaaatcaaaaaataaaatataaaaaaaagtaaagtacctccgattgctgttagcatgacgaagtagttaatacagctgctcaagcagagtggcgcctgacatattgtgagccctcggttgtattcgatgctgttgtgtttagcagagtaagaaagactgtgaacaactgaatggccagttcaagcctgcttaccttgctaatgggagaactgggctgaacaagttctcctgtctataaatgctatgggctttccttgtatttcaggagtccccagtatgggatatttttggaccagaaaattgaaatgccagtggtacctttgaggacccctggcatttcattccagatggaactagtaaacatccggtggaggggggcagggaattatctcagactcaagaaggatcattctcatgaagacagaaagtgtctgcatccatagggtatggtccgctcttatctcagttctgtggagaatcttgactattttgttctagagcagtgatgcctccattggtacctcaaagggtcactgaaaatgtttggggaactctttgattgtcacaatggccaaagggcagctggtgacattcatgggcagaggtcatggatgctaaatgtccttcaaggtgcagagcagtcttccgcccacaaaggctgtcccacctcccacatgacttggtgttttgttttgtttgagatggagtctcacgctgttgcccaggttggagtgcagtggcatgatctcagctcactgcaacctccacgtcctgggttcaagggattctcctgcctcagcctcccaagtagctgggattacaggcacccgccaccatgccttgctaacttttgtatttttagtagagatggggttttccatgttggccaagctgttctagaactcctgacctcaagtgatctgcctgcctcggcatcacaaagtgttgggattacaggcgtgagccaccatgcctggcctcccacaggactttgaaaccacccttagccattcctgtaggcaaagaaccagtttctcattatccaagtctagaacccaattacatataacattgaaatacaaactatttttgcatacttttaataatcactgattttttttcagaaatataactactggataaatgagggggaaataggttttgttttgtttgaaattttacgaagagttggccattttgcagattcttgtcaccaacggtaccactgctccgccttgaatgctgtctcccctgagctgtgagtcccagggcagatgctacccttctcaccctgtgtcccagctccagtcacacccactggtccaatgtgggctggcacagaagactgcaggcctgggggtgcccagcactgggactggagatcagaacacctgacttcaaagtctggtttgagcactttctagctgtgtgcccttgggtaagtctttggtcatgctgagccttggtttctttcactgtaaaatgggatcctaaagtgccaactcggccgggtgtggtggcttcatgcctataatcccagcactttggaaggctgaggggggcgggtggatcacttgaggtcaggagtttgagacctgcctggccaatatggtgaaaccctgtctctactaaaaatacaaaaaattagccaggagtggtggcacgcatctgtaatcccagctactcaggagggtgaggcatgagaatcgcttgaatccaggaggcggaggttgcagtgagctgagacagtgccactgcactccagtcttggtgacagagtgagactctgtcaaaaaaaaaaattataccatggagtggatatgagggcgcaaggagatcatgggggcctgtgctcagcctggcaacaggagcacacaatttacacctgttatcaaagatgaacggccaaatgaatggaggaatgaagggagtggacctcgagattgcgtgcattttctattttttccatggcatgagatggtgtttagggagtcagtggtgttggtgaaaacacacacacacagcaggataagaacaggtgggtccttctgttgatccacgtccttgccctccccttggccttcctccatccttctctctctcggccccctcctgctcccaccactccccatcactctctcaggatgaatgagagggaagcactgaaaccccctgaccagcccccactgcagcatggccttgaggagcagaggccacacctgagagcaggagggcctggattcacgtactgaagccaccgttccctggcggggtgacctggaattcttgattctgtttcctccctggaattccccattatctcgtcacaccttcacatccactctatgaggctggtactttaggatccccatttagcagctagagaaacagaggctcagggtaactaaagagttcctgccttggagggttgggaggatgaaaacttgcaacttccgtgtgcaagttgcttggcccagtacctgaggacaaaggatggtcagtaaacaagtccctgtgccctccctcctcctttgtcctccttttgtttctgggctatgattcacacctgggttatgggagcttcagaaatcctgtattttctaggcaccagagggctgtcagaacagggacaggaaacaggggagctggaatggagtcatggagaagttgatcagggaggccactcaagtgtctccacctgtggaaactcatgctggctccaggatgcaggcgtgtgcagcaggtgaaggggttgaggctggggagcgggataccaggcagaaagaaaggcaagagcaagagagcagggtgttcatgggcgtctgcgaggagccacttgccagacaccagtgactgatcagctccggaggacgtgccatgttcagagatgccccacctgtcttgttcttgataaggacaccccgcttgactgagaattatagtggagatcaacccaacggcctcaaattccagggacctgcagatggatactagtgtccttcaatatcaagattctggaattcttgcctccttatttattcaaatggattaactgagaacctactgtgtgcagacagcattctcagtgctgggatacaagcatgaacaagacaaggtcctggccttctgtcttagtccatttgggctactgtaacaaaataccttagactgggtggcttataaacaacagaaatgcattgtttacagttctggagactgggaagtctaagacctaggcgccagcagattctgcatctgagctctgtgcttcacggtgtcttcttgccacgtcctcccatggccagagggcaaaaagctccctcagggctttgttataagggcaagaatcctgttcatgagggtgggggcctccctaaccccaaaggccccctcttagtaccatcagactgaggattcagtttcaacacatggatgtgggggacacagacattcagaccaagtggcctctaggatggccgtgatgctaatggaagcaaaagtggtgcaaatcaggaaggcgggattttcctccactcaatccggtgacaaacttcttttcctgtctcactttacaggcaaggagactggtcctttgcccagatcccacagccagagaggggcgaggcaggatggaaaccctggtctgtgtccctcggagcctgggccctgggatgtgtgagtctcttctggcttctgtaacaaatgaccactaactggctagagacagcacaactgtagcatcttacagttccggagctcaggagtcggaaacgggccttgcctggctaaaatcaaggtgtcagccggaaggcgctctccctggaggctctaggggagaaagttgtttcttgccttttccagcttttagaggctgcctgcattccttggctcatagccgcctcttccatgttcaaggccagcaatggagcatccttaaatctccctttctgactctggccgtcctgtctccctcttatgaggacccttgtgatgacactggctcctccagatcagccaggatcacctccccacttggagatccttgacttcctcacatctgtaaagtcccttctgccgtgtgacatataaggaggccaagatgcgtctgatctttaaaagactaaagccccccaaacaagtctgaggagactcctggcttgtttttattttggccaggaaagttttccaatatccctggccttcaggcttgtcccctaggaggatggagggactgagctggggagatgtctgtgaatgggggtggggtggattcacaggtttcaggggttagaacgccagtgtctttgggacccattattctgccttccactgcgtggatgatgggaaagctcctggttccagggcgcaaacttagcctggctctttggcctctctgtgcctcagtttatataatgagggtgaggagaatatctgttggggttgttgaagtagtgaaggagttggtaattgaaaagtgctaagcatatgccaggcactgtggacacatgcgctgtaccttttgggagggcacatccctcccccacctgctaccaccccacccaggctggcatgcagtggtgcaatcacagctcactgcagccttgactttccggggcttaagtcatcctcccacctcagcctccggagtagctgggaccacaggtgcacaccattacacccagctaatttttaaattttttgtagagacggggttttgccatgttgtctaggctggaagtccatctgacattgaagttctctttcagttttgacatctgatccatctagggctgtgtgtgtgtgacagtgtgtgtgtgattgtgtgtgtgtgtatgattgtgtgtgtgtatgattgtgtgtgtgtgtatgtgtgcacatgtctttatggggattgagggtgggtggaacagagactgggagagacactttgtgaaatgtttatattttatgccttttgatgtaattccaactagatcttaaatcatgcagcaggaagctccttaaaatttttaatttgttgtttttcttagaaatgattatttccacattgcgcccagagacactcgtgcctcgtcctgcctcccatccttgtgctgttctaaaaggtccccaggcggtggttgtttactgctgccaatcaggtgggctttgcacaaaccatgctttgggcccaccctgtcgttctgtgaagctgtaatatctttgggaagatttttatagcttgtcccacataggctggggctgggatatttagaagaaggccaacctgtagattccttgctaaaaaccacatggtattttacaagacgggttgagagggagagctggggctgggtgtggggcggcatagagctggattcttggggaatcttctccacatttaatttaatttttgacgccgagagcttgatcctggttttgaagaactggagtataagaagaaaaaaaaatcacataaatttaattaggacggaggaaagagatgcttttgatctttaagagactaaagccccaaacaagtccaaagtgtgtccctggcctttaaactgataacccaggaggacggagggacagagctgagggaatatttgagatggggcggggggcgagcgtgggctaatgggtgacccacaagctgacttcaaaggctagctctttacaagcaagcaaggacaccagagggtctgtgaggggtgcggggatgcctctaggggctgggcctgcaggaatttcacaccaccacaaggcaccagcggcaagaggggctcagagaaaggacttgaggccatggtcgcacagggtccctttgcaggggacacctcctgagggtcgggatgggggtaagggcatgaaggtggggcttgggagcgaggcagagatgggttcaaatcccagctagcagtgctgggacaaagcacatgactctctgtgtttcagtttcctcatctgtaaagggaaggtgattttaattcatgatgttgttgcaaaggtggagtgagctggtggggacaaacaggcccagtgaggaacagccatgggatttcaagatggaaacagctttactgtttttgtctgattctaactggggtttctcaactctgacactcctaacatttctattgattgattgattgagacagggtcttgctctgttgcccagaatggggtgcagtggcacagtcatggctcactgcagtctccttctgcctggctcaagccatcttcccgcctcagccccaccaagtagctgggaccacaggtgcatgccaccacacctggctaatttttaaaatattttgcatagagatgaggtttcactatgttgctgaggctggtcttgaactcttggcctcaagtgatcctcctgccctagcctcccaaagtgttgggattacaggtgagagcccctgcacctggccactcctgacatttcaatcaggatcatccctagcatacccactagatgccagcagcaatgcccaggccccagctgtgacaaccaaaaacatctccagacactgtcaagtgtcccctgtggtcaaaatccccccacccccattgatagccactgagtgtgcctattgtaaacgaaacaaaaaccaaaagcaaagattgtatcagacagaatagaagaatataaagaagaaataagtatccagagattctgaaataaccactgtttccatttaagtatacattttttggagatttttctatgtaaacacacacatagtctatacatccaagtgatataaatttaatttttcatacaactgatcatagggatatacgatacgtttttttcttaaataaaattttcactttactggcttttcataaaaatatcaaaaggaatgcacacttattgttaataggtcaaacaacatacaggactgcagagaaaaggaaacgactccttccctcctactttgagtcctactcattctatactattattgctagtaatgacagctactatttatgcaaagctctctcggtgccaccaagcaggtgctaagccctggccacaggtgtctcattcagggcttgctgcatccctctgagatggacactcttattgtctttctagtttatggatgcagaaacccaggcacaggaggttcccctcctgcttgctaagggctggctccacgatctattacatgctacacccatcacaggcctttgcaagtttcctcgccctttgcaggagttgatgcactccgtggagtcaacccttctgtgtttttgttctgctgaactaggcttccattttcaaaagtatctcatggatcaagatggccttcagagctccagccatcacactcacattccagctgtcgggaaagagaaaggaacaaaggaaaaaatgaggaaacacaatactctcctgagcttggagctctccccttaaatccttccatagaagcagccccgcttccacatcggtgaaagagaaaacccagacactctgacgtgctctctctctccctttttttccttccttccttccttctttctttctttctttctttctttttccttccttccttcctttctttctttctttctttttccttccttccttccttccttcttttctttctttctttctttctttctttctttctctctctctccttccttccttccttcctttctttctttctttctttctttctttttccttccttccttccttccttccttccttcctttctttctttctttctttctttctctctctctctctctctccttccttccttccttccttccctccctccctccctccctccctccctccctccctcccttctttctttctttctttctttctttctttctttctttctttctttctttctttctttctttccttctttctttctttctttctttctttcttttagacagagtctcgctcttagtctctgtctcccaggctggagtgcaatggcacgatctcggctcactgcaacctccgcctcctgggttcaagcgattctcctgcctcagcctcctgtgtagctgggatgtgccaccacgtccagctaagttatgtatttttagtcgagacagggtttcaccatattggccagtctgctctcgaactactggcctcaagttatctgcccacctcagcctcccaaagtgttgggattacgggtgtgagccactgtgcctggcctgacctgctctttaaggccgtttatgttctgtgcaccagggcctgggcaccgcacagggcttggttctcagaaaggcctgtgctgggctttgtgctctgctgatactgtctaatggctcttgcatgaggggccccacactttcgtgttgcattggcctgtatcatatcggggagtcacagagctgggcttgatgccacctcctccttctccagcccaatccttagtccccttaagcttatgatgccttcagggggaccaggacccctcagacccccacagccttgtgtttacaacacttcaaccctttaaagcaggatttgcaagtacctgacatgggcacaaagggtctggggaaggaaaagtggggatcaggagcagctgaggttcccaggaaagccacagcctgcctcgagaggctgcctctcagatctggccatggacaaaagtacacttggctgtgccacagccttactgagggcaaacatccagagttgaagatgaatgtcagactcccagtggttggcaaaatccacatttttaaaagcgcaaatccacattaggagattttctccaaaaactaacctggattcttgaaaaaggtcgatgtcataaaagacaaaaatgaaaacaacagcagaacagttccagatgaaagaagacagaggagacgtgacagctcagagcacagtaaggaacgctactgggacagctggggacatagggacacaggctgcatgttagataatagtatgggtgctgttatataggtattagtgtaagaatatgctatcattatatcatatacatgatacatttcccactaaatagtttgaaagctgtactctagttatgtaagagaaaatccctaggagatatatattgaaagttttatttatttattttgagacagagtctcattctgttgcccaacgtggagtgcagtggtgcaatcttggctcactgctacctccacctcccaggttcaagcgattctcctgcctcagcctcccgagtagctgggattacaggcatgtgccaccgtgcccggctaatttttgtatttttagtagagacagggtttcaccatgttggccaggctggtttcaaactcccgatctcaagtgatctgccctcctcggcttcccaaagtgctgggattacaggtgtgagccaccacacctggccatatattgaaagttttagatgcgaaatgttatgacatcagcaagctgtgtatgtacatcgacacatacacatttccaccatctgtctctatacacagagagatacagagagaaggcggtgtgagaaaatagtgtccagtgctgagcctaggtgaagacgggtggatggtcattgtactttttggggcagatttcaaaataaaaagttggtggcaaaacttggatggctcacactctcaggcaaatctgcaggccgtatgtggcccatgaccttcctggtttgtgacatttgcattaaatcacctgatgcataggcaacttcctgcctggctggcaggccccagagaaacatcacctctgtgatcacctgagagctaagccgagaccttgtcccgtgcacttgcaggtagtgcagtccactgagttacagctgggtgcctatttgtcttctctgaactaggctatgagcacagccgggaatgtttcctactcactttcgtatctttctccccacgccctaccccatattattaggactaaaatgcaaagactctgaatcacagggatgtgaacgagagaaacatttacttctaaaacatccttagaaggtcagcaggaaaggggtccaggccttgtgtggctggtactccatgcagtcaacccttctgtgttttttcttttcttttttttttttttttttttgagatggagtctttctctgtcgcctgggctggagtgcagtggcgcgatctcggctcactgcaagcgccgcctcccgggttcccaccattctcctccctcagcctcccaagtagctgggactacaggcgcccgccaccacacccggctaattctttttgtatttttagtagagatggggtttcaccctgtttagccaggatggtctcgatctcctgaccttgtgatccgcccgcctcggcctcccaaagtgctgggattacaggcgtgagccactatgcccggataattttttgtgtgtttttagtagagacggggtttcaccctgtttagccaggatggcctcgatctcctgacctcgtgatccgcccgcctcggcctcccaaagtgctgggattacaggcgtgagccactgcgcccggccaacccttctgtgtttttgttttgctacacaaggcttccattttcaagactatctcacagatcaagatggcttccagagctccagctatcacacccacattccagctatcaggaaggagagaggaacaacaacaaaaaaaaaaaaaatggggaaataacatgtgttacctgctggggaggtttttagaaacttccagatgatgcttctgtttgcatccccgacagtcacatggccactgtcacctccaaggagacctgggaatggagtcattattccgagagaccaagtgcccatctgaaatgtgggggttctgttcatgtagaagagaagaatggtgacactaaggtacaaactgcagcctctgccacccttccaagcccatggaaggcctggcatatacttcattgagaggcagcaaactacatctcttgcgccaaatctggccagatgtctgtttgtctacagtccatgagctaagcatagcttttacactttaaatgattatatttattttattttataatttttttttgaggtggagttttgctcttgttgcccaggctggagggggccgatctcggctcactgcaacctccacctccagggtttaagtgattctcctgcctcagcctcccaagtagctgagattacaggcatgcgccaccaagccaggctaaatttttgtatttttagtagagacgggggtttcactatgttggtcagactggtctcgaactcctgacctcagatgatccacccacctcggccttctaaagggctgggattacaggcatgagtcactgtgccaggcctaattgattgtatttaaaatggatatgcaagaacctatgttaacagccttgatgttgcctctgacctttaagaaaaagtttgccgacccctgtcctggatgcttaataaactcttttaaagatttgtttttcaagtatttaccagcctctccccatgtgccaagcactggagatgcagcagcaagctgccctcatgggggccctggctaggacggaacagagataagaaataactagtgaaatgtagttaactaattacagctgtgcttcctgctatgaagaagtgttaggtgttacaaatgcatatgatggggcagctaatctatttaaggcaggccaagagagggctgaagaggggctgggtagctgaaatccaaagcaggtgaagttagttagcttgattagcccttgaagtgagtgctggggaggagtggagagttccaggcacagagaagaacaaggatgaagaccagaaggtgggaaagatctgtgttgtctggaagtggcaataggccagtgtgttgttgttgttgttgttgttgttgttgtgtaagagtgaagggagaggagagaggcaacatagaaacgaaaagctttctctcctggagctgcaggaaaccattcacattgccatttgcttccgtctgtttccaggagcctttcaaatcccatgaaatagccatttctaaattgtacccactgccctcctttcttttcatcccccctgcctttccctaagtcttttagaaaaaaaaaaatgcagggattccagaaagactggtccagccgcatggaaagcggcccaggaaactgcctggtgatggttgcaaatgccgtgagaaggaaattgtcctgtaattgaaggggaaattctttactaggattgttaaagagttcttctacaagctcctttcatctgtggcttgttccatgccttaattaattttgatccgggaggtttcccgagcctctggttgcacccatgtctcttggagatcaggccttctgttgcaggtggagaaactgaggccaaagaggccctggggtgtgggggaccttgggggaacaagtcctgcatcagaaggctggtttctgaacattttgagcctcaggctttcaggaaagagcccaaagccagccatgtcaaacaagagaaagagtttctacctttaaaaaatgtgtttttgttataaaattggtgaaatcacattttataagtgattagaaaaaaccaacatataaacacaggaatattcatgacctgtttttgtattgtaactggctaaaaaaaaaaccctgatattgcccactgggttattctcctttttcttgattcttgactgaaacccaactgaaactggcttaaataaaaattgtacttcgttggctcacataataataaatcctgaggtagatccaccttcaggcatatctggttccacgggcttaagcaatgtcatcaactttctctctcagccttctttgctctgtggctctctctctctctctcacgctttttctctttcgctcttcaagttttctctctcctctctgctttccagactcatcatgaggtggtcttaacagctcatagagcttgctcagttttgcaacttcaaggggaacgtggtgtcttcttctcaagagattcaggaaaatcccaagagggaacaatattgagaggcacagagatagtaaagaggacttcaaagaattttgcttattgctctgacaatatttctcccttggggatgtttaagtgacgtttgtaaagtttccaattgctttcaactgtggtttttttttggttactgagctgtttctttgaaatcatgtagaaaaacagacacacacaaatcatcacccattattttaccatcactgttattatttgggggtgtcttgttgtctgggtcccaacgcatttctgtgctaagtgtaattggggtggtgatgggaggggtagggtagtgtatttaggctttggagccagatggacttggtctgaattctgcttcttttattcttattaagtgcatggtcttaagtaataagcacggcatggggaaaggaagaaagagaaggcgtccctcgagtcttggaaccaaagccctgagctcgatgctaattggattaaccctgaccattgcctgtggccaggagaatgccacgtgctgactggctcaggttgtagttacctgagccaatcgccgtggaaggcagggagggggggcaccctgattggcttagacaggtgaaggctgctacaatgatggactggactgcagatgtgcggaaaactaccgcagagctggtgcaggctcccgggaggcggggctgcggcacctcctgggccggtagggtccttaggcgcggaggggaggggaggggaggggagagggtcctgtctgggcttctcgccgggcatggctctggggctctgccctccacctgttccctgacctgtgtccctctgctcaccccgcccgtatcccaagccagggtcatgccacgtccccaaccctcgcctttctcctgggcgaagggagccctaaccgctgcagtttggaggccagacggttttttgtttcctccttggcaaaacatgagttctctttttctaagaaaataaagggacttaaaaaagaagaagaagaagaaaatgggaaaatcgtataaaaataaaagcccaaatcccaactccagtagcaaattatactccaaataactcttaacaaactaggcttggaaccattctataggaggcaaccagacccatcagaattaagtttttcataaaggcagagccaaaccgagaaaggttctcaaggaaaagattgctcgaggcttctgaagcagagattttaataattgttatcaatacccacgacttactgagcgcttaccctgcactgtgctaagtgtgttacctattatctataatcctcccgatgaccctgttttacagaagaggaaactgagacacagagttaagtggcttgccccagggcacaccgtttgcaagccacagggctggcacccaatcctgtctctttttccaaagctccgtaaccactgtccttccctacctccctccacatctgggatttcagaatgtttgcagagtgaggttgctggagtgagttggggcttgaggcaggtagagcctcccctcctggtccctggattctgttgggttttggcttggtccttgtaggactacttcaagctggctggagaaggggcttattctttctgatttgttaccccctagattcttccacaaagcgaattagctccagccagcctggagttgcctgtcttcttgttttttagatgagagggaagcaaagcataatgaactgttgcaataggcaagatccctggacttaagaaggaaatagtctcctctcctgctgactttgtgaggcaaagcagaccagaaagggtcaaaattctttcaccagaagtaagtgctaaaaagacaagaagagcaagctaaagtggagaggtactggaggtgctactttgggtgggtgatcacggaaggcctctctgaggaggcgacatagaagcaaggctctgaatgatggaaaagaaccagctgtgggagaacctggggagagagcattgcaagcccaggagcagcaggtgctgagatgtggaggctgagcaaaggttacctagggaaggaagggaagcatgtggtgggaagaaaggccttcctggaagaagaaaatgcctgttgcctttcatgccgggaatgtccctaagccagtggaagcttctgccacagtcagctaggatgtcatctgagtctatgccacagtggtcttcccaacctggtgacctgggggcccactcagtggctaaggaacgtagttatttgtgcctgcagagagtgggatggtgcgtgacatcctgcactaggtggggaaaggaagtttcaataagaaaagtcgtccccaccatggggattcttggggctgccttcacccttgggtttagcgacctgcgaaggaaaacagcccagggagggagggatgtggcctgcctagctgccaggctcagagtgctggcaaggaggaggagcacgctttgttgaggaagcatgagtcgtcacttacaaaatgcttgcttgcttctttctttcttttcttctttccagttcagagcaaatggcaccgccttatcctggaggcaacatcaggttgtttttcaaaagtgaaaattgatatttgctctctgcgttgtgttgactttcattttagtagccctccaggcaagcaaataagaaaatatcagtttccaggatgggaaagcagggagatacaatacttgaggggcaacaacccaaaatttaatatggatgatttgcttaaatattcactgggtctgtttaaacattccagataaccaaaattatatcctgaggaggcagcacagcacatatttaaaccagccgagtgcatgagtcctgataacttgggtttcagtctaatttttgcttcttaccagctctgagaatttgaacaagtgccttagcctctatgagcctcagtttacctgcctaaaaaatggaaataactttctcatagtattgttgcgtctctcagtacaggcttggatatacaggaaatgcttagcatagtgtctggaacatgataacagttcacaacatttaaactagttgtctaataatgatgattagtggaattcgtatttgtagtaatagtgatgaatggtagattccagagtcagactttctgggttcagttgcctggctctgccacttaccgtctgtgtgaccttaggcaggttagttgacttcactgagcctcagttttcccatctacaaagtggtgatgagagtaaaacacagtagtatgagaactaaatgtataagaactaagaaccaatcttggtatggggtgagcattatacgagtgttattatattattaacagtcatctattattattctaaggctagaaagtattcttcctgagagcaagggcttggttctgttttccactgtatctctagtgtcttccacagtgctgagcacagagtaggagctgagtaaattttcaccaactggctgggaatggtggcttacgcctgtaatcccagcactttgcggggccgaggcacgtagatcacttgaggtcaggagttcaagaccagcctggccaacgtgatgaaaccgtgtctctactgaaaatacaaaaattagccgggcatggtggctcatgcctgtaatcccagctacttgggaggctgaggcaggagcatcgtttgaacctgggaggtggacgttgcaatgagctgagatcgtgccactacaccaaagcctgggcaacagagcgagactccgtctaaaaaaaaaaaaaaatcaccaacttggttaaataaatggaatagaaggccatgaatgactccagagttccactgcagatggaaagagcctcactctctatctgctaagcattctggtaggtctagaatagaaatacctctccttcccttcaagtagatgcctttcaggaccaggtcttgtgccacaaatacatacaatgctcagtaaatgggtgtaaaggcttctccgttctccatggactcacagcaccaaacaccaattctgtctccagcatgcatctcccagtaggagctccactggctcaggagcctgagatctccttggtgacccactgtgttcagttcattggcatctccagggccttccacatagtaggcactccactcaggcaagttgatgaaatagtactgacacatacagaggacactcagtaatggcattttgatggagtttgcatgtttgactgaagaggagaagaaagagatgcatatttttctcctcaagctggagcacacaggtcgttggggggcagagcttgattagagactgggccaactgagtagccacaggggctgctaacatctctaggacactaacttgtcactgggcaggcaacgagatagagaaaattacatttgtcagccctccattctgagagaatattctctcaagcatctgcagtcataaggaatattttgataagcggcttgggctgaggatgagatgatgagaccctctctgtgttggttaatttaaggtgccaatttgactggattaaggaatacctagagaactggtaaagcacttctgggtgagtctgtgagggtgtttccagacaagattggcatgtgagctgagttggtgaactgagtggggaagctttgccctcaatatggtgggcaccatccaatcagctgagggttcagaacaaaaaacgcagaggaagagcaatttttctgtctttcctagagctgggacattcttctcctgccattggacatcagaactccaggatttctggcctttggactgcaggacttacaccaacacccttccccttctccctacccccaggattcttaggactttggctttggactgggagttacaccatcgactttcctggttctgaggcctttgaacttgggctgagacatcagcctttggcatcctagtgtttccagcttgcagatggacctcatgggacttctcgcattgtcttggggaatagcatgtgtcttccttctatctgtactaatcttttaaacaaatggccacacccttggtttgctctcctaaagatgccttttatgtggccaggtgtgactcttccaaatctctctgctatgcttttcttttaattataaattttttccttaaataatttctctcctctcacgtcttactctatgtcgttaaaagtagccacacagttccttcagcattttgcttagaaatttcttctgccagatatcctagttcatcactcttaagctctgccttccataaagcccttgggcatggacacagttcagccgagttctttgcctccttgtaataaggatgacctttactccagttttcaataagagagtcttcatttccatctagacgtcataagaatggtctttaccatccctatttctaccagccttctggtcatgaccacttaagtaatctctaagatgattcagactttcctaagctattctcttctgagctctcatcagaattgcccttaatgttcccttcatggcaacagaagcttttctagcatcttcttctgaattcttccagcctccgctcattatccagttgttgttattgttgtagttttaagatggagtctcactctgtcgcccagactggaatgcagtggcatggatcttgcctaaccacaacctctgcctcccaggttcaagcaattcttctgcctcaacctcccaggtagctgggattacaggcgtgtaccaccatgcccggctaatttttgtatttttagtagagatggggtttcaccatgttggccaggctggtctcgaactcctgacctcaggtgatcctccctcctcagcctcccaaagtcttgagattacaggcatgagccaccgtgcctggcccattactcagctctgaagttgcttccacatattcaggtatttgttatagcaacagctccactcccagtgcacatttcctgtctcagctccttttgtgttactgtaacagaatacctgagactgggtaatttgtaaagaagagagatttatttcttatagtgctgaggactgagaagtcccaggttgaagagcctgcatcttgcaagggccttcttgctgtgtcattccatggtggaaggtggaagggcaggagagcatatgtgtaagagaagggggccaaactcatcctttgattaggagccaactctcgtgataactaacccactcctgagataatgccattaatccattcacgatggtggagccctcatgacctactcacctcttaaaggtcccacctctcaacactgttccattggggattaagtttctgacacatgaactttggagggcacattcaacccatagcactccctcactcacgttcaaatagaagtgaattgtcaccaggctgcctccctgggactctgtgctagtggactaggagtggagggggggatgcagagtagggcatgcaagaataggacagagctacattaccctagagaatgaacctgagggtcccttctggcattgcttctcagtttgaaagtcaatagagtttctagcttgcttcccaagatgattgtttctgaggcagggagtgataagccaaggcgtacgtgaagccacagcttaaacgtggtatttctttcgaagccggttgcaaacccttttaggataatttaagacaagtgtcaggacatgatggagtagaataacaaatgtcttcacagatttttaaacacagtatttcaaaaaaatcttgagcttcttccagccaagtcatccagactcttagataatgtgtttgctattttctctgcagttagaaatattttggtggacatggttatgaagcactcacatcgcattccttttttttttttttttttagacggagtcttgctctgtcacccaggctggagtgcagtggcgcaaccttggctcactgcaacctccgcctctggaattcaagcaattctcctgcctcagcctcctgagtagctgggattacaggcgtccaccaccatgcccagctaattttcctatttttagtagagacagggtttcaccatgttggttaggctggtcttgaactcctggcctcaggtgatccacccaccttggcctcccaaagtgctgggattacaggcatgagccactgtacccggtctcacatcccattcttaaaacccgaagagggacccataaaactggccatgtctctttctctctacttcttcttttaagactaatttctgcaaaaagatgacttctttgatcttgaactccttcagaggggcaagctagagttagactatcattggcatcaatggggcatttgggaggcagtcagagtgtctgggttttttgggataaaatcccaattcaaactaagttaaagccaaaacggatgctgtttggctcacagaactggggagcacaaaggtggctccatggattcacatgttgtcatcagagctctctcttttccagttcttctctctctctttctctacatggcctcttgctcttccatggagggacttcatctatgtggctctgtaaaggtggtgggggtcatgggcacagacaaagccaggattacagtgtaaccttgcttgtggcaatcacagaggctatagagagcttgagtttctcagggtttgcctataaaaaacccagggcagggctctgattggtccagcctagatcacatgcatatccctgggccaattagaatagtgagggagatggaatcttgtgattggccaggcctagattactgcctctctctctctaaagggagtggtgggcaagtgtatgatcgacagctgaagtggaatcgcatgggaagaggggcaaggttccaaaggtaggaagaagtcatttaccagattggggagaagcattgggcagaaagaaaccaaagatttttaccacccatgaaaagatattctcataggagaaatgggaagtcacccaatgattttttatggagttagcaccaggttggtgtgggattgtgtgacataaactcagatctttacctaaaaccaggacattttatgggtctccatatcctcaggggaccctatattccttctcaggagaatgttaaaaattagaaaaggaaggattttccaagaccagagcatgactggttctgatttctctatgtcttaagagattaaggtgggagaatgttctggagcaaatggctcagtcttcttccagtttcaaattttgtgcatccttcaatgcatctgacaatgcggctagactaactgggtatgtggaggagatgggctaatggatacaactttccaagtatttaatagcttccagccagaggccacaaagtgatggcatgctttctttggccagcacaggggttaagggggaaaagaaatcaaatgcttgctaacgtttgagatattggaatatctcacatgaaagcctggatttccatcttctctaggtaaaccggaaggcatagtcaaacttggctatagttggctggagctgaggagcagcccctcttagataagtgtgtatactctagtttaccacagtctccgccactctgtcccgctaccccaacccactttattcatttatcccattatgtgtttggcctaagtaagcatttacctttgcaagtcctgtgttttacaacaacaaattccctgagcacagtcactgaagaaccggatatttctttttctaactttgtgcccttaagcaagttactttctctttctaaaccttcttttatctgcaacatagggatgagatgcttactttatttaaccaatccttatgagcacctattattctgaacactgagtttacatcagtgagcaaatagactaagtccctgatctcatcgggcttaaaatctagtgtgggggaaacaaacataaagagataaattgacaaatagatggtgggggcagacaaaggtaggtgttcttgacccagggaagtgggagcacacactggggagacgattaaatgtcataatgtatctaaatcgtttagtccaggagttggaaagctacagctcctgggaccaatctttctgccacctgctttggtaaataaagtgttattggaacacagccactacactcatttacatattacctgagcactacagactgctctatgatggcagggttgagcaattgcgacacagactgtgtgaccctcggagcctctaatttttacgatctagccctttagagaaaaagtttgtgcagctactgccttagcctaatgactggataaatagaaagacctcagctgggtgcggtggctcacgcctgtaatcccagcactttgggaggctgaggcgggtggatcacttgaagtcaggagtttgagaccaacctgaccaatagggtgaaaccctgtctctattaaaaatacaaaaataagctgaatgtggtggcgtgtgcctgtagtcccagctactcgggaggctgagacaggagaattgcttgaacctgggaggcggaggttgcagtgagccgagatcatgccactgcactccagcctggtggcagagcgagactccatctcataaaaaaaagaaggacctcattaaatcgcaacttcttcttaggagtagtgcaaatgacctccctccttgacggttggttgctggccctccagtgctggagcctttacccgctcactgcacctccctaacccacctgcctttttctttgcctgcctaacaggcatgctccttatttagggattagccacagtgagacttccatggaaagttgaatgtggccctaatcgggggcagggttgggtttgcccactgtccctgtcggtgcattagatcaggttaatcagaccaaatcacgtacaggattaggcaggccacagcttgaagcttcatggcagaaagggctggatcggtgttgacttccatttttcagtggggtgtgtgtgatgggcttgctgaggttttctgtggctcatcaatggtctgcccatgtgccagctcccacagcctggctgcctcccagggacctttgctctcaactgcttggggagatttgcttatcctgggcgtcagggcactcatcagcacagacctccagccagggtggccatagggaaagagcaggtggtgtgcagagatgtcaaacaacagcaaagggttctgggtggggagccacgcaggccagcagagtccttgggccgggcctgcttcacgggcacatagagctgggcagccacacaggaccctgcactaaaaaaggccctgtgcttggtttgatgctctgtggtttatgtcttgaaattcttaataagtttggagcatttgcatttttatgtatttatgtatttattttttgagacggagtttcactcttgttgcccaggctggagtgcaatggcatgatctcggctcactgcaacctccacctcccaggttcaagcaattttcctgcctcagcctcctgagtagctgggattatagggatgcaccaccacgcctggctaatttttttgtattttagtagagacggggtttctctatgttggtcaggctggtcttgaacttctgacctcaggtgatccgctgtccttggcctcccaaagtgctggcattacaagcgtgagccaccgtgcccagccaacatttgcattttttactaggccctgaaaattacagagccagtcctgtctttggggtaggaaactgatttgtatttcagttgctaaggggccagagggggcggggcgcagtgagatgtctgtgggtgagctagagagttagaaatgacctggtttcctagcaggctttagagctcctggttcctgccctcatgactcgcagggttttacagggagtaataataatgtggctgaagttggagacaaagaagaccctcccttcctccttcggcagctgatggagcaagagcaagacagcagcaactgcatcatttattgagtgccaggtactttatattcatcctctcatccactcccacaataaccctgtgaggtgggcatccttgttaaactcatcttgtaggtacaggatttgaagatcaaccaggtgataaatttgctagaggtcactcagctagtaattatgtggaatggccatctaagtttagaacatgaggaaaatgttattaaatctattaaatctcttaggttttacttttctggtccggaaaatggaaacacttaaagctaccttgtagtattgttggaaggattgaggaagggatgtacagtgtctagcatacagcatgtaatacacactcactaaatgatacccatggtgatgatgatggtgaggctggtgctactaccgctgctgatggtggtggcgataatggtgatggcaatggtggcgatgatgatgataaaggtgatgctgctgctgctgctgttaatggtagtgatgatgatgatggtgataatgattatgatggtgttgatggtgatgatggtgatgatggtgataatagtgatggtgataatggtggtggtggtggtaacggtgatgatgatggtggtagagatggtggtaatgatggtgatgataatgatggtgatgatgatgatggtaatgatggtgataatagtgatggtgatgatgatggtggtaatggtgatgatggtggtggtggtgttggtgatggtgaaggttacgatagtgagggtgatggtggtgatggtgatggtgatgatgctgatggtggtgatggtgatggtggtagtgatggtaatggtgatggttatgatagtgatgataatggtgatgatggtgatggcaatgatgatgatggtgataatgtcaaaatattggactgtttccagctccaactttgctgacttatacccaccccctgaaagggcattttgccccatggaaaaaatagagcaatgttcttttactccctgagtgtgttcgctttctatagctgccataataaattaccataaactgggtgtattaaaagaaaacagaaatgtactctcttatagttctggaggtcagaagtctaaaagcatggtattggcagggcctctggaggctcagagggaaaaacccgtcctaggcctttctcctcactgttggtggctcctggcaatccttggtatttcttggcttgtagacttatcactcccatctccacctccatcttcacatggacttctctgtgtgtcctttcccatctcttacaaggatactctcattagatttaggccctaccctaatccaggataatctcatttctatctttaccttaattatatccacaaagaccctatttccaaataaggtcacattctgaggttgacgtgaactttaaggaggcacaactcaacctactgccttgacgtaggtcaatgaaagtccaaggaaatgactggagacatgtcacgtccccaccaacaccaggcctcctgcagcactgaccggccccttctgctcctgtgtgctcccctgatggctgtcacagtgactgttgtttggtgccatggaatctgaccaactcctccatggcacctctttgaatgtctgagggcaatgactcacccaggagtctttctggtgtgtgatgatggtgatggactagagagttagtgggtgagtccagccggagctcctgggctgctggatcacaactgtggcctctggaaaatggaagcggcagcttggggccccaccattccaaatcccaggggtgtttgaggcacagagactgtggggtagagatgctgtgtccagcagcagtggactgcttttgctctttcctttcaataacaatttggaaaagaaaattggagttagccatcatcacgggcaagcagagacagatccagggagctaaaccctctgtgtcgccttcctggaagcatttagagaattcagacctacacgttgaagtgcctatagaccaggggaagcccgttccgacgtggacaaaacttcttgagtttatcctaccgcagtgacaggagggtgtttgtgcatcatgaaacaggaaggagattgtgggtaagagagaaagggccactcctactgtctggtatgagattaattccaaggtaaccactcaccctttagtaagagtgagaggaacaactctattgaaaaaggagttttccccactctctaccgtttcacccccaatgccaaccccatgagtcttccctgtctcctgaggtgagaaagagcagctgagagccgcacacactatttttagaaagaaaaccatacagagggtgctgtgttggagaaacgctttgggtgcatgaggttggggagaaggacctgagaatgtggggaaggggcggggcaggaaagtgactgaggataggacagttctatgcctctgtttgggagctgggggcctctgaggggtcccccctccatcagcatcttgaccccaggttctggagagtgccaaggctttgggcaccagatggaagttgctgatggttctgacgaaagccaatggtttctttgcaaagagaacttttcttcataaaaatagaatttgctggttttactagttagaaaagacaaacatgggtggacagaggggagggttgagcctttccattgtgagctaacataaatggaaacctatgcttttagcacctccaacaatgatgctgagaagaaaaatagggaagaaggaaggaaaaggggagggagagagggagggaaggggggagggaaggggggagggaagggggaggaagacaaagaaaggaggagtagaaaagaccaaaacataggctgggcgtggtggctcacgcctgtaatcccagcactttgggaggccgaggcgggtagatcacgaagtcaggagatcgaggccatcctggctaacacggtgaaaccctgtctctactaagaatataaaaaaaattagccgggcatggtggtgggcgcctgtagtcccagctacttgggaggctgaggcaggagaatggtgtgaacctaggaggcggagcttgcagtgagccgagatctcgccactgcactccagcttgagaacagagagagactccgtatcaaaagaaaaaagaaaaaaaaaagaccaaaagataaagaaacaatgatcattttatttattatgattatgattataagacagggtcttgttctgttgcctaggctggggtgcagtgttgtgatcattgctcactgcaacctccatctcataggctcaagcaatcttcctacttcagcgtcctgagtagctgagactaccgatgcacaaaccatgcccagataattttttacttttttgtagagacagggtcttaccatgttgcccaggctagccttgaacgcctggcctcaagcaatcctcccacctcagccttccaaagtgctgggattacaggagtgagccaccaggcccggcctgcgcccaattattaacatgatcttctgtgcaaggaaaaaaaaaaaaagccatcaagtttttttaactcttgaatatcaaacttcttcaagtatcgtaataaaagtaaataataataataattaaaagaaaaacaatgaaagagaaaagggaaggaagagaaaagaacagtgtgtctgagcatcactggaaggagatgccgtggatgcggaatcccttccaggccacggaaagcagcaggctgagcagctcaggtcggggagcgcatgcaaaggcccaggggtggcagagaatgtggtgtgtttaaggaacagagagaagcatggctcagcctggtgggtgggggagagtgggaccagacgggcttggaatgggctggatctgggaccaggcaggaagatgaggcaggcaaagtagagaatggcagacccagagcgcgtctgcctcctggaggctggcggctgctcctcagcatgaaccagtgcagctacggggcgtgtgggctccgcgtggtcagattttctacttcatgactggggcggggtgggtggggggcggtggtggtggaatcccaattgctgcatgaagtctcatgtcttttagacgctggcttcacgtagaaagatgaagatagactttgcagactgaacggggactgtgggctagaatcaactcaggggacatcagttgcaatgctgagacttgctccaggcctctgatcgaagtggaccacggacttggtcattatgggatggttctggagctcaccaatgatcatctttccgtccatccccaccagagctgggccaagtcttaggaacaatcctttgcttcttggtttgtgaagctggcccagggacttaatccaaacaagggcacagccagaaggaaaagggcgtgtcttcctgaaaaagacttgaataaagggatcctattcaaggccggaaaaggccagtgttgaagcgcgtggcagcctgtccaggcaggtctgagtgcgcagtgacctcttacaggagggggctgtgctgcttgaaagttcaccgctcctgcccaggaaggaatctcttcaagcaaaacctgacacatttggttgcagtctctgcttggatgctgcacaaattggttacccttccttcgggtattatgagaagggccctcctgggtacatctggttcatcccctgcctccagcatggagagctgaaactcggtccagaagaagaggctgcaacagatgtattgaaaagcgtgctcattcattttcacttaagaaatgattgatgtctgactgagctgcagaaagaatgggaggattaggcaagactttttgttgtaaggctcaggaagtacactcaaactgggttgaacaaacaaaataagaacggattggctcatgtcactggaaagtcagtccatgggtactaaagtcccttgactctgatttttatgaagacagcttccttcccagtcacccgcaactctacactcagtttctagccaagtaaactcagcagacagagtatccagccaaaaatcccagggctgactcttagtggtccagcttggtcatgtgcccattggtgaaccaatcactgtgactctgactgttttgccctaattcaagattctgccccaagccaggggagagggtcaaaccctgtaggaccacatggaccaaaagtaagggacgaatggtttctccagagcaagtcaaacaccattattagaagcagcaggaatggctgttgtcatggccacacaactggtaaaaagcagattcccttgctgttgttgtttttgaggcagggtcttgctctgtctcccaggctggagtgcagtggtgcaatctcagctcactgcaatccacctcacgggttcaagtgattcttgtgcctcagcctcccaagtagctgggattagaggcatgtgccaccacgcccggctaattttttttttttttttttttttttttttggtagagacagagtttcaccatgttggccaggctgcgtatcctggttttgagcctaggtctgaatgagaatagactcatgtttttaatttgggagttcgagaatgggtggatctagggatttaaacaacatccacgtgacctggcctgcctttctctctctctctcccctgcctccccattactcctctctgctttctactggttggttacttcctcaggcactttttttccccctctgtggcagccacgagcagttcaggatttatgactaccagtttagcaacctcagtggaaagaaatttgtcgtttccaaaatagcaaaaaaacaacaaaacaaaacaaaaaataacccagggctgattctcattgggctgactttggccacatgtccatccctgaaccaatcactgtgacctgtggtggaatacactgactggctgtgcttatgccatgtgccagccctggagcagggacttaattcctacccgaatagatgcacaggaggatgaggatggagtggcttccctaaggcagattgagatgctgttccgagaggagggagatgcagaccatctgaaattacagacatcctctttggagaggggtgagcacgcactggtggggccccagcccttcagagcactggaacgccatgcttggcagccgggcttggttggcagagctgcagctcgggagtcaggaccttagactgtcaaccacagagatttatccagtgcctgttacgggccttatgcaggaaattccgtaaccccaaagtcttctggatgtttaatttggcagaactggagtttccaggagcaagtgtgtttgacagagaatggggaccgtccctcaggagacactggtacccggcatggcaggaaaagagttttacagctctgctgtgtttcataaggtttaagaagagtaacgcattagccgggtgtggtggagtacgcctgtagtcccagctactcgggaggcagaagaattgcttgaacccaggaggcggaggtgtagtgagctgagattgtgccactgcattccagtctgggtgacagagcgagactccgtctcaaaaacaaacaaaaaacaacaacaacaacaacaaaaaagagtatttcttgctgggtgcagtggctcacgcttatagtcccagcactttgggaggccgaggcaggtggatcacttgaggtcgggagttggagaccagcctggctgacatggtgaaacctcgtctctactaaaaatacaaaaattagctgggcgtggtggtgggcacctgtaagctactcaggaggctgaggtaggagaatcacttaaacctgggaggtggaggtggcagtgagccgagatcgcaccacagcactccagcctgggtgatagaatgagactccatctcaaaaaaaaaaaaaaagaaaaagaaaacaaaagtaatactttctatttgcacatcacttggtgtttttaaaagctgttgaaatttgggaactcagaggagcctcataacagtctgtgggtaccagagcctggaagatcagccccatttacagagggggacactgagagggtatgtgatgaggtgcaggttattgggagacctaggctgggaacctgctcacctgccccttagcggcacccacttttcctatctaacctcagcatgagccctggacgcagagagcctgagtgaactgccagtgcaagctcctccttagctgtgtgatattgggctctctgccttggttgcctattctgtgaaatgagtcaacgggggcacctacatagtgggattgtggtagaggttaaatgagttattatgtggaaaaccttagtttcatgcttggaatatggcaaataccattaatcttaataatgcatcaggtagaaattagagtcaattacttctagggtttattttctcagacgatgccagagatgggcagtcagtggcactcagaggctcagtggtgccagcgctgacgtggctatgtttcctttggcctttttcttcagtcccaagatggctgctcctgctccagccatcatatttgtattccagccaaaaagaatgaggagtggggagtcacaaaagggcccacctcccatctgagtcagccccttaaagaactctcatgggcgccccacccactgccttctgcttatgcatggatggccatgcacattgtaaaggaagtgcagaaatgtagtcctttggccaaactcatctcaggattcaaaaacttaggatttctgttagagaagaggaaggagaataaatagtgtgaaggcatccagcaatctctgctacagagttttttgtttttcattttctgaagacccttttatgacctgttagacatcactatgtgtaatggtttagagcaggagttacaaagtaacatacctacaggcggatgtcctcacatgcatgagggaggcttcagaggcagagaggtaatagggagtggtggggactggagcaaagtggagagctcatgcctcatctgtaggtggctgccaatgagaaccagctagttttgcataaaaaagagaagcccagtgttatgagagctttttatttttaatgaaaagtggatataccttaattttagatgagatcagctaggtgcagtggctcatgcctgtaatcccagcactttgggaggccgaggcgagtggatcacctgaggtcaggagttcgagaccagccttaccaacatggtgaaactccgtctctactaaaaatacaaaattagccgggcatggtagtgggcacctgtaatcccagctactcaggaggctgaggcaggagaatcatttgaacccaggaggcggaggttgcagtgagccgggattgcaccattgcacttcagcctgggcgacagagcaagactcaaaaaaaaaaaaaaatttagatgagatctgatttttaggtaatgataatgatttcaaatttactgaaaaaaattatatgaactaaataacacaaaattgtgggcatgaacttacttggggctgattctttgtcctttctttctttctttctttcttttttttttttttttgagatagagtttcgttcttgtcacgcaggctggagtgcagtggtgcgatcttggctcactgcaacctccacctcccaggttcaaacgattctcctgcctaagcctcctgagtagctgggattagaggtgcccaccaccacgcccatagagatagggtttcaccatgttggccaggctagtctcgaactcctgacctcaggtgatgcgcctgccttggcctcccaaagtgctgggattacaggcatgagccactgcgccaggccaagggctgattcttcttttaaagtcagttttattgaggtctaagttatacacaacaaaattaaccctttttagttgtacagttctatgaattttgcaacacatgccgttgtgtgaccatggtcacaatcaagctatagaacatttccacccccctctaaaattcccttgtgttgctttttagtcagtcaccacccctagcctcagcccatggcaactagtgatcttttatctgtccctacagttttgccttctccagcaggtcatataagtgcgatcagtcaggaggcagccttttgagtctggccccttttgctcagtacaatggactggaaattcttccatgctgcggtgtgctggttttgtattgttgaatagctttccactgtgtaggtataccacagttcaaccattcatctgttgatggacatttggtttgtttccagtttttggcaattatgaattaagctactctaaacattcacggacaggtttttgtatgaacatctgtttctgtttatcttggataaatatctaaggtatatctaggatgttttccaaggtgccggggcaattctgcaccccacatgcggtcttcaggggttccagtttttcatatctgcaccagcacttgggattgccaagtgtcttttttcagaggggcatgttttgttggtttaggcatattctagtatgtagtggtatctttctgtggtttcaacttgcagttttctaatgactaataatgttgagcatcttttcattagtctattggccatccatatatattctttagtaaggctgttaaaagaaaaacttcagctgaattaaatttaaaggagtttgagcaatgaacgatttgcgaattgggcagcccccagaatcacagcagactcagacagactccagggtgcctcgtggtcagacccaatttatagccaaaaaaaaaaaaaaagaaagaaagaaaaagaaatggcgtatggaaatcagaagtgaggtacagaaacagctggattggttacagctcgtccaccttatttgaacacagtttgaacgctcggcagcgtaaaggtggctgaagcatgtctgctggcattgccaagactcagcaattgttacaggtgcctcctcctaagttaggttttcaatctcatctacccattaaattaggttatggttcatccgtaagggctcaaatatagaagtatggagtccttctcggctgtatttcgttccctttaacaaggtattggttcaaatattttgccaatttttaattgagttatttgttttcttattactgtcttgtgagggttatttatatattctccattccagtcctctatcagatatgcgttttgcaaatatattttcacagtctgtggcttgtcttttcatttttgtaacagtgtctctcgaagatagaagtttttcgttttaagtccaatttatcaatttgttctttacaatttatgctttttgtgttctatcttaaaaaaacctgtgcctaatccaaagttatgaagattttctcctatgttttcttctagaagttttatttatttatttatttattgaggtggagttttgctcttgttgcccaggctggagtgcagtggtgcaatctctgctcattgcaacctccacctcccaggttcaaacgattctcctacttcagccttctgagtagctgggattacaggtgccccccaccatgcctggctaattttttgtatttttagtagagatggggtttcatcatgttgaccaggctggtctcaaactcctgacctcacgtgatccacccgccttagcctcccaaagtgctgggattacaggcatgagccactgcgcccagcctgtagttttaacttttacactgaggtctatgatcgattttaacttaaaaaaaattgaaatatgggttgaagttcattttttgtgtatgggtgtccaactgttccagcaccatttgttgaaagactttcctttctgcattgaattgctttgacactattattgaaaatcacctggcattaaatgtatgggtctctttctgaactctctgttctgttccactgatccatgtgtccttgcttttgtcaataccacactagtgcctgcacctggtaagtaccgtatcaatgttagttagcgcttgccatattttatcatttaaaaaaaataaacttttaattttggaatttctttacttggaaaatttatttttgaataataatatgatggaaaagtttgcaaatctagaacagagatttatatcctcatatccttcttctcacagctagcttctcctagcattaacgttttacatatccatggtattttttatcaaagcggacacattcacattggcacagtactattagctaagctgtttatttgagtgtcaccaattttcccattagtggctgtttttcctgttccagggtccatttcagaataccacattgcatcgaaccgtgggtttttaagatgcgtctttcaacagctctgtaatcagggtgcatcttacagtccatggtgttttacacattgatagctaggtttttctttttcatagtggcatattaaattagagtatgccttagatttaatgaaatagggtattattattacttgatctccttaaacctcaacttcttcatctgtaaaatgaaaataatgctaggactcacctcatagagatgtggaaagataaaatgagagccaccaaaggaagtgcctcgatagaggttggcacatgagcccttgttaattaatggtggcattaaacccaagcgtaagctctatccaaagtgtgctcctgggggtcagtgagcgcgcctctccttgcctttccctacatcgaagaaatgcctggagctggatttcttagcagctgtccttcaaacaagagcccacaggaatagctaccaattaaaataacaaagtttcaggtgacaacatttgcagaagaagctgcacatgtttaataaaagcccagttgctgggaggctcagacggctacctcttccgggagatccgaagccgcatttcaagtctgccagcaaatttgctttcattagaacaagaccctggccctttctcctcggaatgtctgggcccaggcctcttgtcctgggtcccttctctctttttttgctttcactttctgaaatacattcgcttgttttcttggcttgagcttttaaaaaattatacaagcaacacatctgttacggatatggtagaaaattgagatgaaaggaaaaatgtaaaagaggcctgtaatttcatcactcagagatcgtcactggatacaaagcatttttctttcttttcctgattgttaaaatatgcactaactgtaaaataagttagaaattatagaaaaagcataaaagcaaaacattctcttctcatctcaccatccaggttaccaatgtgtaacatgcaccctttccaaaatgttcatgtctatgctttcatatgtacttaaaaatattgcaagttgcagtacctggggcaggctttgggggtaggccacttggattcaaattttgtctctgtcgccaactagccgtgagcagcctatgtgacttctctgggtctcggtttccctatctgtgaaataggaatatcattagaacctacttcagttattgagaacatgacctgagatacagtacataaaagtccttagctggctgggtgtggtggctcacacctgtaatcccaggactttaggaggtaggagaattcccatgagcccaggagttcaagaccaacttgggcaatatggcgaaaccccatctctacaaaaaatgaaaatattagccaggtgtggtagtgtgcacctgtggtcccagctacttgggagactgaggtgggaagattgcctgagccaaggaggcggaggttgcagtgagctgagattgcaccattgcactccagcctgggcaacagagtgagaccctgtctccaaaaaaaaaaaaaaaaaaaaaagaaagaaagaaaagaaaaaagtccttacacatgatgcttcatacagagtgagccttgaaaaatggccgtgatgactggtgtgcttgtttccaattgctgcctcacaaataaccacacgaactcggtggcttaaaacaacactgtcgattatttcacatttatgagctcactgctttcatggcaaaagattccaggcacggcttaactggatcctcagctctgggtctcacaaggcttcagtcaagatgttggctgaggctgggatctcctctggaggcccagggtcctctcccaaacagatgtggttattggcaaagttcatcttgctgcagctgcagaactcatggaggcctggttcttccaggatagcagaagcatggctgctactatgaaccttgcccttcttccttctctgatctctagagcttctttcaaaaggttcacctgggctgggtgtggtgcctcgcgcctgtaatcccagcattttgggaggctgaggtgggtggatcatgaggtcaggagatcgagaccatcctgaccaacatggcgaaaccctgtctctactgaaaatatgaaaagtagctgggcatggtggggtgcgcctgtagtcccagctacttgggaggctgaggcaggagaatcgcttgaacccgggaggtagaggttgcagtgagctgagaccgtgccactgcactccagcctggcgacagagcaagactccatctcaaaaaaaaaaaaaaagaaaagaaaagaaaagaaaaaggcccacctgatgaggtcaggcccacctaggatcatctccctttgatgaactcaaaggcaattcctacagtaccttaattacagaacaaaatcttttcatctttgtcctagaacataatcacaaaatcacaagagtgacatcctgtcatattcaaggtcctgcccacaccaagggaaggcggttatccaggacatgaaccacaaggggagggaatcttggggctgtcttagaattctgcttaccataactagtactcatagggccttcccgtcaccttgtgttttagtttgggggcaaactaaagggacttaatctgtttccagggatttcgtacttggtaaagaccatcccctctatctgaccaagcactggaattgaatgttgttatggtttggatctgtggctggggaggccttaggaaactttcaatcatggtagaaggtgaagggaaagtgggcatgccttacttacatggccagagcatgagggttatttgtaattcccagtgttgtaggcgggacctggtggaaggtgatcggatcatgggggcagagttcccctttggtgctgttctcgcgatagtgagctatggtgagatctggttgtttaaaagtgtgtcgcccctcccccttctctttctcctgctccagccatgtaaggtgcctgcttctccttcaccttctgccctgattgtaagtttcctgaggcctccccagccatgctacctgcacagcctgtggaactgtgagccaattaaacctcttttcttcataaattacctagtttcatgtatttctttatagcagtgtgagaacagacgaatacaaacatgctgttgaatgcatgaacaagtagctgaattctaaaaacactgatgagtaactagttcattcattcatcccacaagtaatgactgcacccctgggacccctgtgcttagtgctgaaacatataaactcacgtgcgtactaaagacggtgggatctcttaggagcacttactccacccaagtgctgctgttggggtgttccttgaattagctcatgtatgctcacgacaaccccctagtatgatccccattttgcagagaaattgatgtgaagagagatcgtttaacctggccaagactgtacagctaaaaagcagcaaggctgagataggatccagacattttagctccagagcccacgcacatcaccaccctctaccttgtgagccgcactctctcgcaggcatggtctcttggcttggaggtgaacaagctcctttcctctgctatgactgcctgtctctggactctctctggactgatgggagggagaggtgggagggtagacctgctggcaagcaaaggccacagagaaagtggcctcgggtcccctgggccgagggggcagacctgagccatggacagggagatttcagggatcccagtgaccacgtcctctgcccctggcaggagaccctctgaaggaaaggatcaaagggaaagggttggaacttctccccccagggtgacacagggcagccacgtccctgtttatccactcagcagatctggccagttctaagtgttttctgtccatcaaaaatacaccctacttgtggaaagtggggctaatgtcagtctttgccttccagggttgcaggtgggaccacatgagatcatgcacatgaagtgcttaacaccttatctcaaagatggtaagcctgggtacaatttacactactcaggtgacaatgatacttcaccactgcacactatgttatccgcataacacaaatgcacttgtactcattaaatctataacaataaaaaaaatctttaaaaagaagatggtaagctctcggaaattgtgagttacaattcgtgagcaacatggctttcctcttcctacaaagacaatggccctggcagaggctgttcggcccctctcccgctcaggccccaccctcctccagcgccactgctccctgcaaacatgcaggtgtccttcaaaccctcggggttccctaggtccctgtgcctggaaccacacatccctcctgggcctcaggcccgcctcctagtcacagtggttggcaatgtggtgggcactggatgtggctgagccaatcaaagcccttccctttcaaacgggcctgggaaggagaaaactcacttggaggctcacagtgcccctgccctctgtgaaccgcacaagcctggaataacttcttcctggtcatctggcctgggcgaggctgggagctgctcaagggcaggaagaccaaggtcctgtctgctcccataagcctagcactcaaggcttgtgctgaccaatggcaggtggttaatcagaatttgatgaagaaatgaatgaatgaggagttctgctctctcctctttttccatcagtagtcaataattgtcttctcagaagattgcattttttcttttattctttttttctttcttgctcatttattttatttttaattttttttttgagacagtctcgctctgttgcccagaatgtaatttttttcattaatgggatatttcaatttgagtatagtcaaagaaccccccaaataccaactcaggcttcagcaacgatcattccgatgttattttttcatatttccttctctcctctatgaggagggtagaggggctagaatattttaaagtaaaccccaggcactgaatcatttttcccccaaatacttcagtgtgtatgctgaacatataaatatttttttcggataaccataatcgcactctcacacttaacaaagacaattataatttcttaatatcacaaaatacccagaccacgttcaaatttcctccattgtctcaaaaactgtctacagtaggtgtgcttaaatctcattgaattataatcacactgaggtgtcagcaggaatttctttggtcgcaagtgaccaaatgtctgcaactgggatgtttctagctgttccctggaagtaggtttctgtggtcaggaggcctgggaaataccgagttgcagaaagttaggctatcccattcctctcccatctttagaaggctaaagtgtgtggtgaatctgagtgtaaaagagatttttgcaaacttggttgaccttggaaattttattttattttttattttatttattttattttttaaaatttttattttttatttattataaattttatttatttatttatttatttatttatttatttatttatttctgagacagagtctctctctgtcccccaggctggagtgcagtggcgcgatctcagctccctgcaacctccgcctcccgggttcaagcgattctcctgcctcagtctcccgagtagctgggattacaggcacccaccaccatgcccagctaatttttgtatttttagtagagatgaggtttcaccatgttggccaggctggtcttgaacttccgaccttcaagaattcacccgcctcggcctcccaaagtgccaccgcactcggccgatcttggcaatctttgagttcatacattcttgtatgaaggcgatatctcccccaaaggggcaaaaattggttctttagtggcaaaaaaccttttttttttttttttttttggtagagatggggtttcaccatgttgcccaggctggtctcaaactcctaggctcaagccatctgcctgccttggctcccaaaatgctgggattacaggcgtgagccaccatgcatggcctaaaaatcctactttatatgtataaagcccatgtgtacattcactacataaatagatatactgtagatctgtggcattaaaattgcatgtggagggagtggcaaatagagaaaatgttccagaaaagctccttagagggggaaatgaaaaaaataaatgaagaaacattattttattttccatctgcaccttagttcccacatctgtaaaatcgggataataatcgtgcctaattcagagttgtggcaagatttaaaagcatttacagagtgcctggctcactggaagtgctatatatgcattagttattatcctggttgttgttcttgacatttttggagcattttgtaggtgttggtaaattaaagagcccagctctggggtcagatgaactgggtttggagactttcctttaatttgtgaatattccattttctcatctgcaaatgaaataaaactgccttgcgaagctgctgtccacgttaaagggagtaacataagcaaagtccctggtgtattaaccaactgttatttttatccccttctgcagatgggcaaactgagaccccaagccctggagagatgtgttcagacagatgtgcaagtcccccctgctccagcccactgtggctccgggcttcagtcttcagttggcctttgttctgccactttctcctggaagtcacgcctctctctcttcctgcctcccacatcacaggagtctgcacgcacccaaccagctcaaaaggctctgacagatgtgagtttgttgtttttgttgcctttttttaaaacagactgccactttgcctttgtctaaacagagcagcagtgaaggcagagaatctgtaagtcttccttgtccctctgccaagtgctgcctctggtcaaccagagccgccaactctgttatcttttctgctggaggcggtaagggcaggcccggcgctggggctcaccaaggcctcttactggttttctcggctctgattctgggtctggagcccctggtgtaaaccccgcaaggtgaccccagcaaatttgcccttttgaacagggagtccaaggaccctgggcactctcaagcccaactgcagtgacaaaagttctttctttttgtctccaccccatcagcttttgagggtatggctctggtagcccccatagtataacctctgtctggtggccggctcaggttttgggggatgtggagggagggtcagggatgccagcctgggccatcacccgcttgcataggtctggaaatcaatagctgtgtctgccttggaggagggcagagaactttccagtggcttctgttgtgcagttttttatttttaaccatagagtccagcacgggagtcagactgcctgcattcaagtcttatttccttccatcctctataggtgaccccttgagtgactgtggccaagaaacaagttaattaaaatctctccaggcctcagtttcctcatctgcaaagtggggagaatgatagtgcctttttcacaggattcagcggggataaagtgaagggatgcatttaaacctggcacacacaataaatgtcagctgtggctagtagggccctgctgagccggccccgtacacctctcacacttcatttcccaccattcccctccccgcatactctgctacagctgccctcccctcccctcccatcctctctcctcccctccccttccctccctcccctcccctcccatcctctctcctcccctcccctccctcccctccctcccctccctctcctccctctcctccctctcctcccctcccctcccctcccctcgtgatgtgaggcaggcttgggctcgcttcaaggcttttgcttctcggcttcctctgcctggggagcttttttcccagatcttcgccaggcaggcttcctacctgctcgttgtctcagatctggggtcacttcttctaggaggccactttctctcacaagaccctgttttatttgcttcataaactttacccgcactagaaattatctggtgcatttatctcttgcttgcgtattgtctgatctacctaagcaaagtaaatttccatttttaggaaccctatctgtacccccgagcgtctaaaatagcggtggcgtaccgttattggtcagtaagtgactgggtagaatacctgcttaagcaacacaaatccagtgctggttgagctttggttaaatcacgtgtttggtattctgagaagctcattgtatactttcttctcttaattttatgacacacttctgaagggggtactctttttggcctcataccacagatgaggcaacagtctcagaggggttaagtaacttccccgaggtcacacagctagtaagcaatagtggcttagagaggctcaagtctgggtctgtcccagtgcttccttggccctctttttttttttttgaaactgagtctcactctggcacccaggctggggtgcagtggcatgatctctgcttactacaaactctgcctcctgggttcaagctattctcatgcctcagcctcctgagtagctgggattacaggtgtgcgcccccacgcccagctaatttttgtatttttagtagaaacaggggtttgccatgttggccaggctggtctcaaactcctgacctcaagtgatccgcccacctcggcctcccaaagtgctgggatcacaggcgtgagcaccgtgcccagccaaccctggccttcttttgaatgaggtcccagagctttgatggaagagggagtgaagaacagcagtgcaaatatgtcttgtttgaagcacactttcattctgcactagtaatatttacatcccaaattgcctttgagcctcccagcagccctggtgtatggtgggatgtgaaccaaggctcagagccaggatgtaatctcttggggccaccggatcctggcttagccttctgtgggacatgtggttgctggacttgagaaaggtctcagcttaaaccctagccctctgggaacctcctctgagccagtctggtcagctgccagtccggtatcactcttcctcgaagtgcggcccctccctggcactcacccttgcatgccattgctcaattgcatcttccctggcttgctggactcgtgccgtccagtgcagtggccactagatcaacagggggcaactttgcaacaacaggggacatttggcagtgtctggagacatttgtggttgttgcgtctggagagaggggacgctactggaactggaggaaagagtccagggtcgccgctgaatgctccacaatgcacagcacagcccacactaaaactatgggatcccggttgagaatctctgccttagacctcagtggctactgagcacttgaaatgcggctgggctgagctgagatgtgctgtgagtacagaacacacactggatttcaaagacttagtttgaaaaaaagaatacaagatagttgattaatcatttttaaatattgactacatgtcaaagtgataatatttggatatagtgggttaactaaactggaggataaaattcggtgtgcctgtttctttttatcgtttgatttgtgtctgctagaagatttcaaatgacctacagggctcacattatattttgattgggcagcagtgtgctggactagacatccatgaggaaaggggtctgtctgggtttgcttgtcaccgcaagtgcagggctggacaggagcttgacacgtgctgggtgctcagtagatagttactgagcaggaagaaaggagggacagcagagagggagggagggagaaggaagaaagaaggagggagagaaggaaggagggagggagggaaagaaggagggagagaaggaaggagggagggagggaaagaaggagggagagaaggaaggagggagggagggaaagaaggaaggagggagggagggaaagaaggagggagagaaggaaggagggagggagggaaagaaggagggagagaaggaaggagggagggagggaaagaaggagggagagaaggaaggagggagggagggaaagaaggagggaggaaggaaggaggaaggaagaaaggaaggaaagaaagaaggaaagaacaaaagggagaaagggagggaagaaaaggaaggaagaaggcaaggaggagagagggaggaaagaaagagaaggagggaaggaaagagggaaagaaggggggaaaggaaagaggcagggaggaatagaaggaaggagacacaaacactcccggcagctgtcttgaaaggcctctaaaaccccactggtgagcccagaattctctccccatgtccagtatttaaggcagctgccaaggagcgttccttccttctagcggataccccagctgccccgtccctggtctctgccctgtgtccccgcccagtgtctcctccaggtccccttggctggggatggccttgggtactcacttcatgccctgtttgggagcttctccatttgcaacctgctcccattctggtcctcattagcagtgagaggtagtcaggtttgaaaatcttagctgtgtgagcccggagcctctgggataaaaatcccagggatgcagttccaggctttctgtgactttaattatctttagcaaaggggttgattttccccacaagaaaagggggtgagccccggaacacatatttaggaacttctttcctgtcctgactatgagctttctgagaatacggcgaatacttcaccattacacaacagagatgactgagcaagtgtggggagcatggccagctggactcgacaggattctttacccaatattaaaaacaggtcagtttttggccaggcgcggtggctcacgcctgtaatcccagcactgtgggaggccgaggtgggtggatcacctgaggtctggagttcgagaccagcctggcctacatggtgaaaccccatctctactaaaaatacaaaaaattagccgggtatggtgggaggcgcctgtaatcccagctacgtgggaggctgaagcaggggaattgcttgaacccgggggacggaggttgtagtgagcctacatcgtgccgctgcgctccagcctgggtgacagagtgagaatccatctcaaaataaataaataaataaaatagaaacagatccgttttcttctcagccctctgaagcttgtggattggctgggagcagctgtgaggggaggaccgattccggctggcaccgacagaggatgtctagagggggcatatttgaatcctaaacccggtcgtttgactccccaggtagctccgcgattgtcatcaccaacagtctggcatggaactgagaatttacagggatgaatgatgagtttctttttgtttatatgttcctgagattttttttttcttaaagaagatcatattgtggcagtaaccttttttttttttgtactgaaattgcaaagtgtaggaaaacacaaagaaaaaataaaaatgacctagaatcctatcactcagtgcttatcacagcaaacatctacctttcagccttttgtacataagaattcataatttattgggtatagtattttacaatattcctatcatattgccattttaaactgtttttttctttatatcaagaatgttttgtcatgacatctaatatgcaacatcacctgaaatgactgcatcgcacttcattgtaaacgcaaaccgacagttatttaaacaattctctattgttggatatttaggctggctccaactttttgctcttgtaaataactgtacaatggatatcctggtatataagtctttgcacacatctctgattatttccttagggtaaattcctagaagtaaaattactggtgaaatgattcacacatattaagacttttgataaatgccatcatatttgcctagaaagtttatgacaaataacatttccaacaagaatgtgagtctgtctccccagcccctcctcatcttctccagtcctgggatacattaacgaaaatgcagaggaaaaaaacataaataattctacctccaaagtaaaccactgttaacaatttggtgaatatttcctccagattttttactgtgtacttgtactcatgtatgtgtgtgtgtttcagaaatggaatgatgtatacatattgatttgtgacctgatttttattttattttattttacttttttttagatggagtcttgctctcttgcccaggtgggagtgcagtggtgcaatcctgacttactgcaacctccacctcccgggttcaagtgattctcgagtgtctcagtctcccaagttgctgggattacaggcatgcgccaccactcctggctaatttttgtattatcagtagagatggggtttcaccatgttggccaggctggtctcgaactcctgacctcaagcgatctgcccgtcttggcctcccaaagtgttgtgattacaggcgtgagccacagctcccagcctattaacctttttttttttttttaactgcatgttgtcatcatcttttatgaagcatcagtcacttccatggcttcatatcattacagcaaagtctgtactggagaatatttcaccagttctttagtgctgagcctacaggctgctttcaacatttcccatataaatgatgtggaaatacatttctttccttatacgtagtttctaaataattccttaggaataaaaaaaatgcacattttaaaggactttaatatgtattccaaaactcagaacagttgaatctgtttctttcctccagttgtgagggtaccatttctccatttggctaacaccgtgggttaccattcttttcaaatattgctactctgaaagagatacggaatgatgtcattacaattacaatttccacctccattgcttgattcctcatgaatctaaacatttctcctgcatgcattgcccacttttatttccatttctgtgatttgcctgtcatttttctttagccatttttatgactctatacgagctttgtctattttaagaggctaaatactttgtcatgtaggttgggaatatttttcctcattgttttatgtcttttaattgtattagtgatggtttttcgtgtccaggagttttaaaaattaattataatgaatacaagttgtatttatttattgtatacaacataatgttttgaaatgtgtatacctggtagtgtggctaattcaagctcattagcatatgcattacttcatatacttattctttgtggtgagaacacttaaaatctactcttttcctgattttcaagaatatcttgttggctgagcacggtggcttacacctgtaatcccagcactttgggatgccaaggccggcagatcatctgaggtcaggagttcgagagcagcctgaccaacatggtgaaaccccatctctactaaaaatacaaaattagccgggtgtggtggcacatgcctgtaatcccagctactcaggatgctaaggcaggagaatcacctgaacccaggaggtggagattgcagtgagccgagatcgcgccattgcactccagcctgggtggcagagggaaactgtctcaaaaaaaaaaaaaaaatcttgttattaactatagtctccacgtagtacaacagatcacttgaagttattcctcctctctaacggaaaatttgtatcctttgaccaccccctggcaatcaccattctaccttctgcttccatgagttcactgttccaggaatttatttttattattaaaaaaattatggaacgtttcacaaatttgcatgtcatccttgtgcaggggacacgctaatcttctctgtatcgttccaattttagtgtatgtgctgccggagcgagcacagtccctggaattttggatgcttatgttgactcttcatgttttccctggtggtgtctgccttcataagcctagaagggccttcaggggaatgggtttgagggcccatagccacagcgggacagttgaacgaatattcagagcaaagcagatgacacggaatttatagggcgaatgagatggcctctggcttcacagaagctgtgtcagtcactcggcaatgcagcctgggaggtggagagccctctgtcttttcttaacttttataagggtctctgagcaactcattatgtgcagaaagagccctgggtagaatcctggactctggcagggctgcctactcaccatggagcctcagtttcttcatttgtaaaatgaacgaatgagccaggatcgcctccttggaccccctgactgctcatgacgtatggccttaaatatggctctaaatgttactccccatggagccctttctaggtatctcaggccagagtcctcaaaggaaagacataaagatttgactatatgaacattaacaatccctggacgtcaagaaacaccacaaataaaattaaaagacaaagaacagactaggaacaatgttttcaacaattacgtcattcagcctcccgactcagccaatgggtggatgattcctgactttcctcccccagaggggtggggaaggtgcaaggtgacttgggaagacagccagcttggggcacagggaaggtgctcagtcgaggcttttcattttcttgaatgaatgaatgagtgagtgaatgaatgatgaaatctgcatcctaggtactgtgtatcttcctttgaattctgccccatttatttttatttttatttttattgttattattatttttgagatggagtctccctctgtcacccaagctggagtgtggtggcgcaatgtcagctcactgtgacctccacctcccacgttcaagcgattctcctgcctcagcctcttgagtagccgggactacaggtgtctgccactgagcctggctaatttttgtattttttgtagagacggggtttcaccatattggccaggctggtcttgaactcttgacctcaggtgatccacctgcctcagcctcccaaagtgctgggattacaggcgtgagccacaacgacggcctatttttatttttatttatttattttttagatggaatcttgctctgtcgcccaggctggagcgcggtggcgcaatctcggctcactgcaacttgcaccttctggttcaagtgattctcctgcctcaggctcctgcgtagctgggattacaggcgccactaccacacccggctaattttgtgtatttttagtagagacagggtttcaccatgttggccaggctggtctcgaactcctgacctcaagtgatctacctgcctcagcctcccaaagtgctgggattacaggtgcgagccactgaattctgccctatttaaatgaagagaagacagatcctcgaccacaaagagaaagtggttcgcttctgttgcttactgtggggttggcgctgtggaacgtcccagcctcctctgaattcatctggaaaacgggtttaaaaattcttacttccctgcctcctgcctcctccctagaacggacgtcagttgggatgaatcagagcctcggtattttggctcagccgttgttttggcaataagaatgattaaacagatagtttatttattttactctcatcttctgtacccacatctctggaagagctgtgttcataggtgtggagacaagtaaagagctttctgacgagtcagaagctggtcatgggaaggaaatgagggcatctcctaggtaaaggaatttttattttctcactggatttcttctcactttaaactggttcttttgtgttcttacttggctgggaatgtctggaagtcagcactccagctgctgaactccagaactcagaaaagatgcacataaatagactttggttgcagcatgaaatattgggttagacatcaagagggactttctagtcaatgagattgtgtaggcagaggaagaaatggaggaaaatcataaaactttctactctgtgggaaaggtagttttctgggaggcactccagcgcctttgggtgagaccttgtgccacgttcccggaggcctgggtggcagcaatgaaaggaggaagtgaatgcagccctgatggcaggctactgaggacaacgcagcactgctctcccattttacagctgcagaaaccgaggcaagatcctgcaacaaatatttacagaaggtgtctgcatgccagccttattctgagttctgaggacaccgcagtgagggaggcagagtactagcaaacaaggtcatgaatatggaatgtgatattgtgcaatgatggggctggacaaggaagtgagcggtagggagggatggaagctgctgttgaaagaatggtcagggaaggcctctttggggcagggtcatgtgagatgaaatgactcacccagggtcatttagaccccagatacaattgagtctgcttccctggctcctagtcaggggttcctccagggtgtttttgggcctaagtaacagaaaacccaactcaaaaaggcttacgccaagaaaaaaaagtttgtctaaaaaaatccaagggtagaacttgtttcaggaatgtcttgatccaggatctcaaatcacattgccaagccctgccctctcttatgtctctgcctcttccacaagggttctaactcccaggctccctgtgggagcaggaaggtgacagtgtttccaggcccacggctcccaggttcaagctggcaagaaagagctgctccatcctcatccatttgaacaaaaatgctgggcctgactccctcagccaggtttgggtaacagacccgctttctgaaccaatgggaatagctagggggattttctgcatggactgggcaggctgtgtcccaggcccatcctggagccctgggctgtgggaagggagggagcatccccaggtgaagttttgacccttgttagcaaaggaggaaggatgattcaggccggccccaacctagccatgaaagtgctgcctggccccctctctgtactgtgtccacatccatcatttcccccaggctttattgagcacctgctgtgtgcgtccatctctgtttcccagagcttagacttcaaggtataggaattgttttgttttcatttttttttataatcctccaagatcttccagtctacttgaagaaacaaaagccacatcctgttttttatcctgtctttttgtggcttgctcatggcatgaattttctagctgtcaacaaagggaggggcgcttttgggctggaggagtcaagaggccttcaggaaaaaggagggcttttgatacattttctttctttccttcctttctttccttccttcctttctttcttttctttcttctttcttctttctttcttttttttttttttgagacagagtctttcactgttacctgggctggaatgcagtggcctgatctcagctcactgcaaactttgccttctgggttcaagtgattctcctgcatcagcctccccagtagctgggattacaggtgtctgccaccacatccagctaattttttgtatttttagtagagatggggtttcaccatgttggccaggctggtctcgaactcctgacctcgtgatttgcccgccttggcctcccaaagtgttgggattacaggcgtgagccgccacgcctggcccagtgcattttcaagggtggcttatatcaggagaaggttgacagaggctagaacttgatagtgcatgcaggctatggtgagcgggacacacaccgtgtgattatgactttttgggatgtgtggttaaaatgtgtgtagttcttgaaccactgaggtttataagattataaggcaggacacaggcacatgtttatcttagtagtcaggtatttattccaagtttatgttagaagcaactatgttattaacttatcagacctggataacattgttcaggatgaaactaaaattaacaaaaaataaaagtggcagggagtccatttaaacaaatatcatacatataggtggtagcagacatggcaaaaatgttgttatgagaatgagtaaggctgggcgcagttgctcacggctgtaatctcagcactttgggaggtcaagacgggcggattgcttaaggtcaggagttcgagaccagcctggccaacatggtgaaaccccatctctactaaaaatacaaacattagccaggcatggtggcgcatgcctgtaatctcagctactcgggaggttgaggcaggagaatcacttgaacccaggaggcggaggttgcagtgaacagcggtcccgaccctgcactccagccttggtgacagagcaagactccatctcaaaaaaaaaaaaaaaaaaaagtaagttttgggaaatgctggtctagccctcagattctggaagcagaaagacatggattcaaatctcagacccaccccacatgtacagtgaagctttgggccagctgcttcacctttctagccctcagttttctgaccagtaaaatggggctgagaatgggataggagcagtctcacgggagatgttcaggaatctctgagatgtggttatgtgaaatgcctcttctccaaggggacattcagtaagttaactctccataatctggattatttttcccaggaaagaaagaaaaaaaaaaaaggccgtccagctacatgtgcaggaagtgcaagggccagaggtgggaaggaatgtggcaggttagggagactgctgcagtggggtggggtggtccctgcaggagagagcagggatggtgttgtgtcagggaggagaggatttgcaattttacaggaaacctatggagtaaataagcctcctctgggactacatgtggtaccttggaggacgggcttacctgtttcacccaaatctctttttgctcccagcagacctctgagcgccactgtccaccgcagcctggggctgggctcatctctcccccatccagagctttctgtgcagacagattctggtgaacctgggttgggctccatagatttaatctatgttgtttatcttttaaacaccattaaccacaaattagctgattcttttgtggctataaattaatagattccattagtgaacagcaaattacaggatgattacttttcctccctgaacttggagcttttttttatagctttttgagagggtttggttctgtcctcttcctgctgccgctttcctatctaggttctttgttcattggaccaaatcttctgaatggcccgggaggctgagagtgggtgacatggactatctttgtaatgaggttataagcctgttcgctttgcagaagcaaaactgactggaggtttgttttcaagagaatttttgtttcaatcacagaccaaaccagcaaagttgccacctccttttactcctgcgtataacataaacacatcgtatttgctttttcttccatagctttgttacttctgaggcctcattctggtaaatactggataatcttttctttctatccatctgtctatccatccatcgattcccttatccatccatcctcctctatccatctgtccacccatccattcatctacccttcctccctccctcccttctttccttccttccttccttccacctgttcctgttccttcatcctcccattaagacacagctgcccctacaaagctcagctgagggtctggctggagctgccaggaggggcactgatcccactacatccatctgccacgtcctaaagcattcgggtagtgacatcgggctaatttttggaacccgtagctgcacacctgttataggatggcaaccaatgtgctctcaggtgctaggcaggtaacttaaacaactaggtaggtaggcaaaaataagtctcagggcttcagtgaactgtggggttcaaaccactcctaagactttctaattcaaataaaaaataatttttttttttgtttttgagaaagggtctcactttgttgcccaggcaggagtgcagtggcatgatcatggttcacagcagcctttgtcacctgggctcaagtgattctctcacctcagcctcttgagtagctgggaccacaggtatgaaccaccaagctcagctaatttttgtattttttgtagagacggtttcaccatgttgcccaggctggtctcaaactcctgagctcaagcaatctgcccatctcagcctcccaaagtgctgggattacagttgtgagccactgctttcagccaaaatgcagtatctttagagtttggggttgggtttgtgacttttgacatatcaatcagaattctttagttgcaagcaacagaaatggactcttctaggctgaataatgcctcccccacccccaccaaagatgtctatgatctcattcctagaacctgtgaatcttaccttacaaagggactttgccgatatggtcaagttaaggattttgagatgaggagattatcctggattattaaggtgggcccacggaatcgcaagggtccttgcgaaggggaggcaggagggtcagtccagagtaggagatgtgctggaggcaaggaaggagccaggagccagggaaagcaggcggcctttggaagccgggagaggcaaggaaacagattctctccactgttttcagcaagaacgcagccctactgatgtttgacttgagtctagtgaggttgattttgtccttcagacctccagaactgtaggagaatacatttgtgttgttttgagccacagagttagtagtaatttgttcccacaccaataggaaaccaatacactagcaaaaaaggaatttttttttttttttaagacagagtctcactctgttgctgaggctggagtgcagtggcatgatcttggctcactgctacttctgcctcccaggttcaagcgattctcctgctttggtctcctgagtagctgggactacaggtgtatgccaccacgcccagctaatttttgtatttttagtagagacgaggtttcaccatgttggccaggatggtctcaaactcctgaccttaaactcctgatctgcctacctcagcctcccaaagtgctgggattacaggcatgagccaccgtgcctggctgaaaaaagaaatttattaagagaacttgtagtagcctctaactccaactaaaaacagaaactccaaaagggagttccagagggagctgtggctctagagagcaggcacaaagaacagtcccgcagggcacctccgctgggatgaaaatcagcatttcccatccgttctgaggctgctcaaaattcaagttccaaggagagagtctggctgaacttggggccagtgcccatgccttggagagggaggacatcataactgagagtcttggtgggctggaagttgcccagagcacaatcagatgccatgactggaagaaggggtcagcgcccgtccatgggaaagagagccgatcactcattttgagtctgttgcccaccctttgtccagtctgctttggccagggtgggggcatggacaaccaggatggcagttgggaccctcctctttaaggacaagggctgggcagacacactgctgtggcctagatcattcccagctatgttctacccttagtaagcccagctgtgggtgctttctgattagaaatctgaattctcagcctcggggagggcggtccagccctactgacctcagcttgtggtctgcaccccatgctgattcttgctgggattagggtcaccgtctcctaactggccccggttttggaacttttctctctagcctcccatctttccaacatgtgtccagttttcttccacaatataaacacattaattcttcccggagtgctgaggggccatgaccatgatgatctcaacactctgggcattttgggccagatgattctctgctggggtgcggtgggaacatctcttgtacattgtaggatgttgagcagcacctccagcctcaacccgcaagatgccagcagcaccctccccgagagtgtgacaaccaaaaatgtctccagatgttgccaaatgtcaagggcagtaccggccctgcttgggaacctctggttggaaggatctctctatttccaccacctctcccaccatcccagcatccctccctcagccacggttatcattggtgtctcagttcccacccttgatttcttccagtctattccccagaacctgccagggagatgttttctggaaagaaaacctgatctcccgtcactcctttgtctgaaactcttctagtctccatggtgctcttggctaacatcccaccattcgctgtctcctatcagctcttccaatttcgccagcctcatggcccatgcccctccccgctcccctttaagcttcaaccacacactgaccttctctgggtcccctactgggtttttccactccagggcctttgcacattctgtttcctcccttttttttttttttttttttaagacagaatcttgctctgtcactcaagctggagtgcagtggtgcaatctcagctcacagcaacctccgcctcctgggttcaagccattctcctgcctcagcctccccagtagttgggattacaggggcgcaccatcatgcccagctaatttttgtatttttagtagagacggggtttctccatgttggttaggctggtctcgaactcctgacctcgtaatccacccacctcagcctcccaaagtgctgggagtataggcgtgagccaccgtgcctgaccatttttttttttttttttttttttgagatggagtctcactctgtcacccagactgcagtacagtggtgcgatctcggctcactgcagccttcacctcccaggttcaagtggttctctgcctcaacctcccaagtagctgggattacaggcacccgccaccacgcccggctaatttttgtatttttagtagagacagggttttgccatgttggccaggctggtctccaactcctggcctcaagtgatctgcctgccttggcctcccaaaatgctgggattacaggtgtgagccaccatgcccagcctgtttcccctctttggaaaactcttcctgccactctttccttcattaacttactcatctttgagacctgtttcacttaggaatgcttttggctaaaattatagtggtttaaacaaaaacagacatatttttctcccataacaaaaaatctggaggcggctggtttctagtattggttctgtgacttggggctgctatctctgcgattctctttgctgttccctcagggtcacaagacggctgcctcagctccagctatctcattcccatttaaggcaggaagaaggacagtggagccagctgacttcagcttgcatctcattagtcacaattgttcatggcaaccccagctgcagtggaggctgggaaagtgtttaattcttgcagccttgatagaaggaatgagtaaaggagaatggggttgggaatggctgtccattaagtattggtttaaatgtcacttcctccaggaagcctctcttgattccctaaaccaggtctgataatcctattacatgctctccttgtagatagtacctctctgtcatacccttatcaccacctatagttttttttttttcaatttttttttttttttgagatggagtctcactttgtcgcccaggctggagtgcagtggcacaatctcagctcactgcaacctccgcctcccgggttcaagcgattctcgagtgtctcagcctcctgagtagctgagattacaggcgtatgccatcatgcccagctaatttttgtatttttagtagagacggggtttcattctgttggccagactggtctcttactcctgacctcaagtgatccacctgccttggcctcccaaagtgctgggattacaggcgtgagccaccatgccctgtctaaaacctatagtttattaatttgcttgtataatcgattaataggcatctgtttcttcttggggctgggagtttagttcatgagttcactcctgtttctctagcccctagcattgtgcctggcacccagtagggcctcagtaactatttctggtctatactaactgctgccaagtaattcttcccggagcactgagggaccatgaccttggctggcccaggaccccctctgactcccaggggaaggacagacaagaacctcctttaatcaggtgcctccccagcagtggccaagccttgctctggcaagctttctatgccgcccaggtttctggaatgggtccatcagagtttcaattgcacctctgttggccacagcattgataaggagaggaagcttgtatgcagatcagttctgagatactgcacagaaaggaagctacttctgttgcgtcaccctgtgccctgggaggattgaggatccgcaggacccagggctgatccccacccacctcatctctggcttctgcctgccaggtgggacttttaggttttcttatttctttttattaattgatccagttatttcacatgtgatttgtaattttcacttaaaatggaaaatgtgagtgacatcaagcattggctttctgcatatttattgggtatccattgtgggctggtggtggaaattcagaggtgaacaggaggttgctgccatccttgcccccttaggaactgcagttcagcttgggagacagacaaaggcattaatcacagatatagataaatgaaaaattgcaactctcataagccttgtgaaagagaagaaatgaaatagatataattttgtatttgtccattatgccttaataaagctgggggaaagaagagaagaaatggtgccagagagtctatgaaagggattctccttagggaagttagaagaggcttccctgaagctgcaatgaaatgagctcatgcaggaaggaaaataggggccagacaggtgagcaggcccagaaggtgcgtttcaggccacgggaagagccagggcaaaggccctgggatgaggcttaacatgccacagtggtttcctgagctgttacaacaaatttccatgaacttagtggcttaaaacaacagatattgattctctcacagtgctggaggccagaagtctgaaatccaggtgtcagcaaagccatgttcctcctggaggctctaggggaaagatccttccttgcctcttccagcttctgatggttgtcagcaacccttggcgttccatggtttgaagacgccttactccagtctcttcctttttcacacggccttctcccctgtgtcccggtgcctcaaacctcctttttctttctttcaaaaagacacaagtcggccagacgcggtggctcacgcctgtaatcccaatactttgggaggccgaggtgggcagatgaggtcaggagttcgagaccagcctggccaacatggtgaaaccctgtttctactagaaatataaaaattagccaggcctggtggcgggcacctgtaatcccagctactcaggagaccgaggcaggagaatcgcttgaaagtggaaggcggaggttacagtgagccgagattgtgccactgtactccagcttgggtgagagagcgaaattctgtctcaaaaaaaaaaaaaaaaaaaaaaaaaaaaaaaaaaaaaaagacacaagtcattggatttagggcccatcctaaatccaggatgatcttgtatcaaggtctttaactgaattactcctgccaagaccctttttccaagtattgtttcattcacaagtatggggggttaggacttggacatatgtttttggggacattattcaattcactacatgagtctgagaaattgaaagcagactcacatggatggattgtaaggagcccggggtcctggcatgggctgaggcaaatctcacaggcatgaagccatgctaaggggactggagctgctaaaggactttatgaaggaaagtaccggaatttgatttgttctttataacaatctcaagggccacaaagtatagaatttacaggagggggcaacatgggtgagggcgatctattaagaggttgctgaagctatcagatgaaatgctggtgtctgtgtctttgtttagggactgaagggccagatggagaaagaaaaacacatgtaaggggtattttggagatgatggatttgatctggagtgtgaggaagagagaggggtcaaggataacttctgcatttctttctttgctgtgaaactatttgggatgtggacttttgggagaggtgcagattttgggggaagatcttgagttcagttttgaatctgttgagtttgaggtgtctgtggttgatggctttcacaaatggtcccacttattctctcccagtgttcacacccctttgcaatgtgactttgcagttcctccattgaatggaggagtcaattttcacatccctgggctggccttgtgacatgtttggcctgcaggatgtggaagacgggacaccctgccagctataagcctgtctcaggagtccttacaagcttccactaactcttttagagccctccaggatctccaagtggacaggctcatgctgacctgttgaatgatgagagaccacatggagcaagatgagccatcccagctgagcccatcctaggctacctggctctagctgaccttgaatgagatcagccaagatcaaaataactatccagctaattccagcctgagttactaacttcagaatcatgagcaaactagctggattttagggatggtttattatgcaccagtagctgataaagtcccttgagccagccaaatagagatgggaaaaggcaatcaagtagttggacgtacaagtatagggttcagatttgagatttaggtaggagaaacaaatgtgtgtatctcctggatagaaggaataagtttgtgaaggagacagaaaaggagtggctggagaagtggcagagaaactaggagaagccacagaaggaagaagttgtggacagtgtcagctcctgctgaaggtttaactggattttaaagcaagggacagcatgagcacagtgagtggaggcatggctggagatggcccagagatccctcacctgttagggtgaagccaaagcctgaccctgaaaagttctcgatcgtctatttacaatttgcttagttttttgggaagaattgatttttgattgcacaagtgaggtgattgcaaaaacagccacagattcttcccatccctgtttgtgtgccctttgcaatgactttgcaggaactttcaagaggtatccaccccatgtatctggctggaacacatgacttgctttggccaatgggacaataacagccatgacttaagtagaggcttgaagagtgtatgcatgaagcttccttctgtgttctcaggatccctgctatggccccagcgtgaagaagccaagactagcctgctgggtaatgagagatagatggcccagtgattcctgcttcctagccaatagccagcaagccccagaagcagagccacctaggtaaatggcagatgactgcagacacttggaggagcccacccaagatcagcaaaagaactgcccagttgagcctggcccaaaatgctgaccctcagaatcatcagctaaatatgcaatttatattttaagccacagtttcttatccatagagtggaagtaataatagtgttttcttactagggtttttatatagattaattagagtaactgagacatgtaaagttctgaaaacaacacctcgcacaataaatgttgattcttcttttataataataatcaccaccatctcctcctcctccttccaccatatttccagatatagaaaaatccactttgtagtctttctgctactgaagaacatttagattatctgtgtttttgccatgaacatccttgtacttgcctctttgagtgtttctgcaagtttgtctccagggtagatacggagaaggagaagaactggatcatagagcatatgtgtcttgaattttaaaagatattctcaaatttatgcacctcccagcagcaagggggctcccatttcctccacactcacacctgtacttgctgtcaccagaaatgctgcctctctgttttactttgccttgctccaacttctcgtgaagttggccgtcttttgcatgtttgttgtttgtggttcccttaaatgggctgacttcccttcagagcctcttccctcgggaaaccctgcctctcacataggccccaacttgggtcatttatattcctccctgttccagtgaagtctctgaattgtaaggagcagaacccagataggtagttcaagtaagaagagggtctgctgaaagaagctggcaaaatctcatggaactcaaggcaggaaggatgggcccagttcttacagaaactgggcagttgttatttctttttctctgggaccctgcgggctctctcctctctctctgccccttccccttcttcttccatcattaacctgatctgttcaattgctggaggaaggaacctgattggatgagccctgtcagtgggttggctcccttttggtccggtgctcatcctgcccagttggctgcagctgcttggagcacagggctcctgctccctctccctctccctctccctctccctttcttcttcctcctcttcctcctcctcctccttcttcttctttttctttttctgatggagtcttgctctgttgcccaggctgcagtgcagtggttcaatcccgactcactgcaacctctgtctcctgggtttaagcaattcttgtgcctcagcctcctgagtagctgggattacagacactggccacccaaagtgctgggattacaggcatgagccaccacacctggccaaggctgccttttctggccatgggtgaaacacgtagcttaggcacacccaggggactctatcccgggagtgggccaacactgtttcccaggcagcatgagtcctgaattcattcaacataaaaaaaaaaatcaaatcagaaagaaaagaaagaagacaaattcttccagccacatctaatacaggaaaaggaaatatttgctttccctacagattttctggtcagttgcctatggtagattttttttttttaatggagtctcactgtattgcccaggctgagtgcagtgacgctatcccagctcactgcaagctccacctcctgggttcacgccattctcctgcctcagcctcctgagtagctgggactacaggcacccgctaccacgcctctctaattttttttttgtatttgtagtagagatggggtttcaccgtgttagctaggatggtctcaaactcctgacctcgtgatccacccacctcagcctcccaaagtgctgggaccacaggcatgagccactgcacccggccggatattttttttttttttaagatgggttcttactctgtcacccaagctggagtgcagtgccacaatcatggctcactgcagcctcaaccttccaggctccagcagtcctcccacctcagcctcccaagtagttgggactacaggcacatgccatcacacctggctactttttgtatttttgatagagttggggtttctccatgttggcaaagctggtctcaaactcctgggctcaagcgatcttcctgcctcagcctcccaaggtgctgagatcacaggtgtgagccaccgtgcctgacgtatggtggaattttaacaatgccaaatgcttagggccgaccttttggtctaggaacatggaaatgttacgtgtagccaccaggattaaatgaagagaaagtcggctagtgggtgtcctgatagagtacctcattcccagctcttacttggaatttttgggttgattcgcatggctgcttctcaaaaactttcttctcacgtggtggccaggactttgtgggcctaagccccgtccagagctgtggcgatctcccgggcactcgaatttcatttctccttggccgtgttcctggtacttcaataaaaaaaatctgaaaagcacggggagtttatctcttcagctacaaatgtctttcatttctccggaaagaaatgaaaacacacactgccatgtaatgatgtttaccgaaaaaaacaatctccctgtaaaatcaacagacaaaacctgtataaaatggatcattcagcggcttccttgcaaactctacaccttaatccctgccaccagcctgtgcaccttgagctctttggcattttgtttgttttactttcttgaaagcgcatgagtggaaagaggcatgtccacaattgtgtgggtgagcagcgaggagacattctccaaatagctcatcagagcatccatcaatagacgtttttctcctcggctcatggcagcgaatcaaatatttaaatgtgatttttagacttaaaggcacatgaagcaatttgtttgacgaaggagggagtgggttggaaaactctgctctgatgatggggagaattttctgcagggctgaagctaactcacctgtgacacatgttgcctacaaattggggtgcccctatcatgtaacaaaggcccctttgtggagggggtcaaggctgcaccccatcagtgggctcgggggctgtagtctccttggcgacaagtcctttgccctgacaacgtccacctcccggggatgttccccacggcagctttttgagttgagtgctgacaactccgatttgccagcgaagggggaaaaaatcaaaaatgattcatccgcctgctcagcgtagtgggaaagggactgacggggccttcagccgctcggcatctcaccgtggcagagggaaatgctaacaggagcagacaaccacggtggaactgggggttgggggcacaggagcaggagaacggaacacgagaggatctgagaggggcacgccaagtgggttcaggcaagagaccccgagaggctcgtttcgccaaagcatcaccttgggagccccgcacctgcctcgtctgggccagtgctccccgaggttggtggtcctatgagagctgccgttcttaggctgggactggtagccccaatgtaatttggtacccaggtggacatttttattacaaaaatgcatagtagtgaaaacacaactagcatccaaaaattatgctttcaggtgctattttttttttagtagaaataacgacaatccttacccgggaagcagtcattattgctggccaggccatgttccaagtgataagcacaagcctctgtttttatggatgggcgaatgcatacaggtctaagactccagtggttggccgggcatggtggctcacgcctgtaatcccagcactttgggaggccgaggtgggcggatcacttgagctcaggagttggagaccagcctggctaacatggcgaaatcccatctctacaaaaaatacaaaaattagctgggcctggtggtgcacgcctgtaatctcagctacttaggaggctgagacactcgagaatcacttgaacccgggaggtggaggttgcagtgagccgagatcgcgccactgcactccagcctgtgtgacagagcaagactccttctcaaaaagaaaagaaaaaaaaagactctaaagagtcccatgaaaagttaccaacattcccatgttacagatgagaaagccaccgatgccaaagaaattacatcaatttctccacactcatcgtcccaggtgttgatttgttgatttttataaaccaatcataaccagttcagccttttttttttttttttttttttgagacggagtctcgctctatcgcccaggctggagtgcggtggcacgatctcggctcacggcaaactccgcctcccgggttcgcgccattctcctgcctcaccctcctgagtagctgggactacaggcgccgccaccacgcccggctgatgttttgtattcttagtagagatggggtttcaccgtgttagccaggacggtcttgatctcctgacctcgtgatccgcccgcctcggccttccaagatggtctcgatctcctgacctcgtgatctgcccaccttggccttccaggatggtctcgatctcctgacctcatgatccgcccccgcctcggcctcccaaagtgctgggattacaggcgagagccaccgcgcccggccagttcagccttcttctccctccacacgccatccggggggtgctcagtggagacctgttgactcacagctctgtcaactcatgagccccgtgtgtttcccgtcctttttcttgggccgactgtatgacttggcttatgtaaacccggctcatcaaaatcgtaacagatgtctatcccacagcaaggctcacgttccctcttccagaaaagcctgcttttctacatttaggaaatggtgacgcaggtaaaacacagcaatttgatcagtcatggtttagaaagcatttcaccttctgtggggtcaattccaaggcaacaggcaagcttgggaatgtgtgcagtcccaggcaaggcgtctgcgtgaacaggggagcccccaccgtcaagctgctgcctttagcatctcgcattcctagctctcagctccccgcaggacaaaaggctgctttccttccctgcctctgaggttaacaatcggcccattcacactcccgacctgtctggtagctgctggaaaacaggtccgtgcaacacaagcaggcacaatcctcacacaaacatttccccgcattctcgcactgccaatgcactcagcacacatccacatactcacacacagacgcttacacacatacacacacccttatggttattgatgcacacccagacacactctcacatgcaagcacacactctcatacacttttatacacaaacacagtctcacacaacactctccctctacacacacacacacccagaaaatgcgaactcacacacacacgcacacacatgctttctcacacacatacacttgcttcttctgggccagtgttccccaaggttggtgggactcgtgcacacacactctcacacacatgctcatgcactcacacacagacacagtcacacacacacacagacacagacacactctcattcctatgcacatgcacacacactcccctcacacactcacaggcacacactccctccccccacacactcacacacacactccctccccccacactcacacacagacacactcacagacacactgcctcccgcacacactcacacacagacacattcacagacacacactccaaccccgacacactcacacacagacacactcacacactccgatccctacacacacacagacactcacagatactccctcccccacacacagacacactcactcccccccacagacacactcacagacacacacttcctccccctcacacacacagacacactcacacacactctgacctcgacacacactgaaaaccctggtagggaccaggtgtggatatgcagatttcatggtccaagctgaggaaaaccttgtaaattgatggtcagtgaattaatcaaaaagcctctactgggcaccaggctgcaggctccatgctggggcctggggagcccaaatcaggagagaggcggtggtgaggcagctgggcacagaccgatggatcaggacccacatccctccaatctccaaggacctggagtctcttctcagcctcagtttccccaggtatagtgactcaatcccctcacttccttcctttctgtggtgccaaggggctcgacacccctgggcagggagatgggtgccttctgatccatggtgaagccttgcctggcttgctctgggagaggcaagcaggtagccagcgcctcagaggcacagggcctttgcagcagtggcgccacatgccggcagcctcccccagggtgaggtggcctattatacacactggctctggggccaggtgagtggcctgtgttcaaatcctgcctctgccacttataagctcagcagccttaggcaaaatgctgggcctctctgcagccgtcttacttgcagggcacggatgatgctggctcacccgttcctcgggagagtgagtgagtgagttcacagagagccctggggacagcgggggctcagctcagcaccctgcctcctgcctcaggttggaccttgtccctggctacctccttctccccccagcatggccccttatctggccctccttcctcagagaggcctgcccgggccacctggcgagtgtagcttggtccctgtggcctcatagtaccctcctttttttttttttttttttgagactggcgttgctctgtagcccaggctggagtggaggggcaccaccatacttcgctgcagcctcaacctccccaggctcaagtgatcctcccacctcggcctcccgagtcactgggactgcaggtgcacaccatcacactctgctaattttcacattttttgtagcaatgggatgttgccatgttgcccagactggtctcaaactcctgggctcaagtgattctcctgtttcggcctcccatagtgctgggattgcaggggtgagccactgtgactggcctctcatagcatcctctttacctccttggctgagctcgtcacaacttacaacttgatatttattcctctagccttttccttccccactagactgtaaggtccgtgagagcaggtctgtctgttccccatggtgtctccccggagcccagcagcgtgttggcccacagaaggcactgagtactttcgtgctgaagaagcttccaataaccctgacagatggagaagcaaatcctgctgtgtagaccaagagggggaggggctgcagaggcagggggattgggggtaagactggatattaggagacagtgaggagaggcagtcacgccccgccggacagccgcccacttgcagggcacaggcggcataaagcagtttattcagggagccccaggcccaccaggacagctgatcaaggcagggacacggccagccactgcgtttttgacacgacttgctggctcagccctggagaacgtaattataaaccccaactccacgaggaggaggagtttcagcctctttttccctgagtattttgtggagcccaaggcccaggcccgtgagccaactccctgcagggtggctgagcaggcgcgggtttcttttcaccttgctcattagaggattaacagtgaagaaaaaagccataaggacagccaccgggcacacactgtcacccgtgacctcctgcatcccccggggttcttctttctgccagggcagacagacataggcacctctcaccctggctgcatgcaaatgggcctcagtttcctgaattgctcacctcaggggcggtgccaaggggagatgaacatacaaatgaatgaactaacatactctctaagtaaaaaccatgcttcctctgtgagtggaggcttcagacatgcctaggctccccttacatctgggcttagccttgagcccctccgaggcagaaattctgaaacccctttgtctcaacttgaactcaggagccctgtttctcctccatccctgtcccttcctcctactcatttgccaagtgacctcgcaaactcatagaatgtctctggaataatacttgcccgactgtcatctcctccctcttaccttctccacgggatgtgaatttctggtgacaaaacgtccctgcacctttaaccaaatcacttccaaacctcactgagccccgacttactcatctgcaaaataagaccgtggcagcggagctccccacgcacacaccatggctcacaaagacagcgggaatttgggggagcgctcctggggaggtggagaacaggttaaaggggtgggtgtggtgggattaatttgttcctcacaaggtcttcagtgcttctgcttttaatttcctgtacctcttggaaagggattaacatcttattgctcaaagcagtgactggggagaggcgtgagcaggaaagatggttctaagatggagtgagtgtctcaggtgggagggaggcggctggggccgaggtgaggctgggctctctggctttcctggcaggggagtgcttcctcttccctagttcacacctgaccggcctgctgagctttccacgggctgtgggagtgaaccctctaagttttttccagcccttcctgcagaggtaatgtctatcctcgtgtgtgcctctaggagctgctggattaaaatagttaaatcaaggaaggacccagccaagccatccccacccatggctgggggcctgtcccagggccagcctgcctcccgggtgctgtttccgggtttcctggggagctttcatccctgggcacagggtggtttgtgcacagcgaggagaggaggtgggagcctggcggagtccaacctgaccccacttgtttgttcccttcagaggcttctctgccccttcccagagctccctctatgaaataacttgtttgctgaaaaaaaaactttctttactcattttattgctggtaagtgtcctggtacaataacttattgtgtgttggtctgaagtgagggtggggtgcggagaaccttgggagctccagctgccccttgccctcccccacttgaacaggtaagacttccgagatcagaggtggaagctgggaagccctggaggctcaggagcaagcaggagcgagtctccacttgccttcagcctctgcttttgaagtgtgattgccttgcagatgggctccacccacacaaccggcccttccctggcaaaggctgggcaaccgctgctcccgcccagcatcccccaacccacacctcaccccccgcaccccacatacacacatctgtgctctgcggattcccatggaatcttaaggcccttaataaggagtccacacgctggggcaaatgcacgatctgagcaggtgtgttcatctgggcttctagttgaaatcaagtctgaggtcatttctgttggaagaagacttactcatttattcatttattaattcattcaacaaatattgatttactgccgacaccacatgggccacatggccatgctggggattaagaagaatgggctgggggtgagcatagcagacactcctgcagtttgccaggggagagagacacggaacagattcgagaataggggcagaccaggcacctgccatgtgccaggcactcacctgagagctttgcctctagtatcgcatttaatcttcataagaacctgatcctgtaggttgattgttaggatcctcaatcagggaaccaaggctgacagaggtcaagagacttgcccgaggttgctcagccagtgaggagcagggcctggatttgaatacgaggtgcctggttcagaggccacacctataaccaggaccctgcatgcctgtgatgagttcttaatcgccgtgagaaggccaggagcgaacagcagggtctgctctgggcgattctagaaagggaacctgattcaggctggagatcagcaagactgtcggaggaaacgcccttgaagctgcacttggaaagatggggaagaatcagatgggccaagaatggaagcatgttccaggaagagtgaacggcatgtgccaaggccccgaggcagaagaacgtggtatgtgggaggaatgcacggaggctcatgtggctggagccagcacacaggtcctgtcccttttgtagcagatgcagttccctactcaccaattgctcgcccttctcccacctaaccaacagcaccccgcttctctcccccacagccccgagggagggtgagtttcaggaaaggtaggctccaacccaggtgtggcagaagctattttctccaaatggctataatgatctctctggcctcacatgctcttccggggccttgccacactctgttaagtggcagaggtgattgatttccctgtcatttgagcctgggtggattctgtggctgcttcggcgactagaatgcagtggaagtgagcctgaatgactcctgaggtcaggtcagaaaaggcgatgtagcttttgcttgtctctgtctctcccccacccccttcatccctggaacccagccaccatgttgggaggaagcccaagcctgcccacatgggtagaacacatggagaggcccatgaagaaaaacaggcctccagccaacagccggtctctaccaccagatatggagtgagtgagccttcggatgattctagccccagcctttaagacttctgactgaggctccagacaccttaaagcagagacaggctgcttctgccacccgaattcttgactcagaatccattagcataaaaaatgtttatgcttctaagtttgaggataatttgttacacagctatagtaactgggttgcttgtctgataagcccattccccttgccagggattggtttgagggtgggcttgggattcaactccagccaatgagaagtgagggggtgtctactgaggggacttctggggaagatttcctgctcttgaaagaaaagtattagccaggcacagtggctcatgcctgtaatcctagtactttgggaggctgaggggggtggacagatcacttgagcccagaagtacaagagcagcctggacaacatggcaaaactctgtctctataaaaaatacaaaaattagccatctgtgatggtgcatgcctgtagtcccagctactcaggagattgagacaggaggatcacgtgagtctgggaggtcgaggctgcagttagccaagattactccactgaactccaacttgggtgacacagtgaaaccctgtctcattaaaaaaaaaaaaaaggaaggaagaaaaaagttatcaagaagatgcagtcctttactccctccagatgaggctgtatgagaagataataactgggcaatggcagccacgtttagactatgaggggagtaacccaaagatggtggaatacaaaaagaggaagaatcttggtccttaagtgaataagccatggattatccaaccttgggcccaccccacttcagtgaaataataacccccctatgtttaaagcattttgagtttgacttattactttctaagtgatatattgcctttcccctcacatcccacctttcccctgctccggctcacctctgaatttggggcaggaagggcttaagaagctctggtacacaaagaaaaaattcctgtttagtatcctcgaaggtcaacagtgggagggaattgaaaggggattctggccaggaggtctgatagtggagaaaagaggttaagaaagaaagggagaaagtcaaaggtaaagaccagtgagggaagaaacagaaaagatcatgcagtaaaaacaagaaaagtaaggacaaaagaacaggacagagatctggggggaaatagtaagggcttcaaggctacaagacatactttgaccaccctctgatgctagaacagtcttcctcacatcctcttatgaggccacacaagacagggattaaacatgcaaactctggagatagaattatgattccattactttctgtctagatgaacttgggcaaattacttaattatactcaacctcggaagatttgtaaaataggtattgattatcaaaatgctcagccgggcatggtggctcatgcctgtaatcctagcactttgggaggccaaggtggctggatcacctgaggtcaggagtttgagaccagcctggccaaaatgacgaatccctgtctctactaaaaatacaaaaattagccgggtgtggtggcgggtgccaataatccagctattgaggaaggagaattgcttgaacccggggaggcagaggttgcagtgagctgagatcacactgcttcagtccagcctgagtgaaagagcaaaactccgtctcaaaaaaaaaaaggtcaccccaaggggttgctgaaaggattttactcaggactctactaagctgtcagtacagaaattcaattcaggcttcagcaatatagaaaaatatttgactcatatccctgaaaggtcaaagagtatctggcttcaggcatggctggatccagggactcaaatatcaggagtggatctctatgcgtcttttgtctctttttctcccattgccattactttcagtcaagcttcccctccaaggttgcacgcagatgtagccctatgtcccaccttctcagcaggttcaaagggctgatacctttgttcctgggtcttgggagtgctatgattgcaccaatatgtgtcctgtacccattcctgcacatattaagtaactaaggggatggattatgctgatcaaccagaccagggtccttggtatggaggctgggccagctctaccccaaccacgtgggctaagatggtaaatgtagtaaatgcatgtgtgtgtgtttgggagtgagagggaggtttccagaaaaattgagttgctattaaaagaagcagggatgactaccagacagacacaacagagtttacaataagtacgcttggcagctatgttaggacgttcttgcattgctataaagaaatacttgagactgggtaatttatacagaaaagaggtttaattggcttacagttctgcaggctttacaggaagcatgatgctggcacctgcttggcttctggggaggcctcaggaagcttccaatcatggcagaaggtgaagggggagcaggcatgtcacatagcaggagcaggagcaagagagagagagtggggaggtgccacatttttaaatagccaaatcttgcaagaagtcactcactattgtgaggacagcactaagagaatggcacttccctctctcgtctcccgatttcacacacaccatgccatctgcctgatgcactctttgccttccctctttgcccacagcatggtgcatccttctgatttcagcacaaacattacatgctaacggtccctcctatgtgctcccaagccccctgggcttttctcattatggacatgtcatgccatggtgattacgaggctccctctccagaacaaggtttctcaactttggcaccactgacattggggactgcatcattctttgttgttagggggctgtccagggcactgcacaatgtttattggcatctctggcctctacccattacaggacaacagaattccccccaccttcagttgtgacaacaatagtcatgagaaatccaccgccacgagctaatcacctcccaccaggccccacctccagtactgagaattacaaattaacatgagatttgggcagggacacagatccaaactacatccgagctaacacttccgctgctcgggacttctctaagagaagcaatttcaaggaaggcaaaccctgactcttttttcttttttttaatttaatttaatttaatttaatttaatctaatttaattttaagttctgggatacacgtgcaggacgtgcaggttggttacataggtaaacatgtgccgtggtggtttgctgcacccatcaacccgtcacctaagtattaagccccgcatgcattagctatatatcctgatgctctccctccctcattccccctgcaacaagccccagtgtgtgttgttgccctccctgtgttctgattgctaggctctcacttataactgagaacatgcagtgtttggttttctgttcctgtgttcgtttgctgaggataatggcttccagcttcatccatgtccctgcaaaggacataatcttgtttcttttgtggctgcatagtggtccatggtgtatatgtaccacattttctttcttttcttttcttttcttttttgagacagagtctcactctgttgcccaggctggagtgcattggcaccatctcggttcactgcaacctccacctcccgagttcaagcgattcttctgcctcagcctcctgagtagctgggattacaggcgtgtgccaccatgcctggctactttttgtatttttagtagagacggggtttcaccatgttggtcaggctggtcttgaattcctgacctcatgatctgcccgttttggcctcccaaagtgctgggattacaggcatgagccaccgcgcctagcccatgtaccacattttctttatctagtctatcattgatggacatttgggttgattctatgtctttgctattgtgaatagtgctgtgatgaacatacgtgtgcattgtctgtgtgatagaatgatttatattcctttggaacccggactcttgagtggaaaacatgtcaagaacaaattacttttttaaaaaatcgtggtaaaatacaaatgacataaaacttaccattttaaccatgtttaagtacacagctcagaggcattaagtacatttgcgttgttgcacaaccgtcaccaccgcccgtctccaggtgtggtcatccaaactataactccaggtgtttgtcaacccaaactataagtctgtccccattaaacactaacaccccgccccctcttcccctgcgcggctgacgacttcctttctatcttctgtccctatcaatttacctgctctaggaacctccggaaagtggactcgcccagtgtttgtccttttgtgtctgctcctttcactttagcttcatgtcttcaaggttcatctatgttgcaccaagtgttcaaattttattccttttgagaccaaatgatattccttagtagggatattctgtattttgttgatccactgatctgttgatggacatttgggttctttccagggcagaggcctttgaagccaagagagcgcccactttcattcttataggcagcttgacaccccgtcagtatttgcctgcccctcttcctgtcctttctggagtgcagttattcctgctcggaaaggagcaggagcaaactagagtaacattggaagagaggaggaggagggggaggggattcataattttttaaaaaaagttttcaccaaaggaaactctttttgtttttgtttttttctttgagacagagtcttgctctgtgcccaggctagagtgcagtggtgcaatatcgtctcgctgcaacctctgcctcccaggttcaagcgattcccctgcctcggcccccggagtagctggcattacaggtgcctgccaccacgcccagacgtggtttcaccatgttggccaagctggtctcaaactcccgacctcaggtgatctgccctccttggcctcccaaagtgctgggattacaggcgtgagccaccgcgcccagcctggagactcatttttaagaaaaacgaaacaaaacaaaaaaaattagatctggtggcggtggccgcaaaggaagcacagttgtcagaaggagagctgggacttttcgaagcgcttactggaactaacagaaatgctgggctttgttttgtctttctcgagaacacgcactttttggaataaagaactccaaaaaaaagctccaagagtggtgaaagacctcggagcatgaaattgcattactggaaatggtctggggcttttgttcctggggctgggacctcgggagggttggtttagtgacaagcccagccagtctgcggaggggcatggaggggaaggggggcaggaaggggccattagaatggccctctggtttcccacctcctcagaaggacaaagtctcagggagctagtcatggtcagatgctgctcaaggggaaatgcagaagcgtggtatcacccctcgccaaatgcatcaaacagacaatagcggtagcagtggcagcagtggcagcagcggcaaaacaggcagaactggttagaggctataggcgtgtgagccctgcagcccactctgaggtctttaaataatactgaatgaccataactgcctccaaaagggtcttcttgcctggtttgctaagagacaaatctgttctgctcacaaaccctcacttcacttcagaaccttctatggctccctattgcccttgagattgagtcaagcttcttaactaagtgatctacatgatctgacctctatatatggcttcttcaacctcagctgttccattcttccccttgcaccgcccactccagcaacacagccccctctgcttcctccaagaaaatcagccctctctcgtcccccaattttgcacatgccatgccatctgcctgatgcactctttgccttccctctttgcccacagcatggtgcatccttctgatttcagcacagacatcacatgctaacggtctctcctatgtgcttccaagccccctggcttttctcattataaacatgtcgtgctatggtgattacaaggctccctcaccgtaacaaggtttctcaaccttagccccactgacattggtgactgcatcattcttgtcggggggctgtcctgggcattgcaaaacgtttattggcatctctggcctctacccactagaggccaatagcatttcccccaccttcagttgcgacaaccacagatgtctctaggcatttctacatgtcccctaagagaaaaaattgtccctcattgacaaccaccacaccggagaaaggtcttatcactgctgtgtccccaatcagcacatacttgttgggtaaatggatgaacaaacccgcacacattgggtccgtagaggacatttgtctctccaaagtcttgttggaccaagtcttgttggacccacgcaggactgtgctctgtgtcgagtgaacagagaagtcattggtatgaccacttcaaggtgttccaagtggcaaaaggggctcagcgtgggctggttctgccagggtctgtagctgtcatcatctgcttgggtacagtgaacctcagggctctagacctgtgatatccaagagtggccacacaccacatggctcctgaacccttggaatgtggctggtccaaactgagatgtgttgtgagtgtgtaacacatatcagatgtgaagactgagcaccaaaaaaaaacccaacaactcattaatagtttttagtaatgattacatgttgaaatggtaatattatgcacatattagcttaaataaaatatattattaaaattcttttcacctgttccttactattttttattgcttctactataaaaacttaaattatttctgtgagtcacacttgtgagcaacaccgctgtggaggaccctctattatccagtctggaacttcaccactcacccagctgctcctggttctcgaactctcgtttactggggggaagggaagagaagctaacattgagttctgttgagggcccggcactctgtctacacaaccttgactaatctcactaactctcttcctacctctgtgagatagactccgcacttggttgtgacagaggaggaaactgagggcctggaaaaaaaaggaattacttctattttgacatgactccatttcaactttgtttacaataagaaaaaaattagacattattgtaccactgcactccaacctgggggacagagtgagaccccatctcaaaaaaaattagacatagcattatgcagttggaaatcaaagtcagctgctaggaacagaagccagagtgaaataataacttaaaagaaacagaaagatatcttcttgtgtgaaagaagtctgaagatgagtagcccagggctagggtggagactctacacttatcagggatttcagcaccatctgtctttctgttccactgtccctagtatgtagcttcagaaagatgtcacctcatgattctttatggctgctggagttccagccatcacacctgtattccaggcagctaactaggagggaggagaagaagcaagaggacttttacaaaacattttctgtgttacaatgtgctaaatattgtgccggatgttgagagtacgagtgaacaaaatagatgctcctgtatttctttcatagtcagcacaaatgaacatcttccttgacacctttcagtctctcccatctcttgtctgatccctcagcgaatcctgccagctctgctgagacccatgtccagaatcccaccacttgtcaccacctctccctcgcttgctgttgttctgtcttcaggtctctgttcctgtcacctccgcagagaggaggtgacctctctggggaggtgacaggagggaggagggaagggaggaaggaggaagaggggaaggaaggagggtaccccacccatacactcctgctgattttatttttgagatgggtctcactctgtcccccaggctggagtgcagtggcgccacctatgtctaatttttttctcattgtaaacaaagttgaaatggagtcatgtcaaaatagaagtaattccttttttatcaggtcctaagtttcctcctttgtcccaaccaaataaggtgtctatctcatagaggtaggaggagggttagtgagattagtcaagatggtgtagacagagtgttgggccctcaatagaactcaataaatgtcagtttctcttcccttccccccagtaaacgagagttccagaaccaggatcacctgggtgagtcgtgaagttactgattggataatactgcatccatcctctcccctgcccccactcatttcactcattctcttccctctcttcccccataacactcaccaacaagaacggcaggcgtcgaggttgcacctggtatttccactgcaaggtactcagttcctagaattgggcttgcctcagagcaggctcccacttacatctggtgaaatgagccacaagcctttcgaggccccgtcttcattggtgccattaaacttatgtagtcaaaacactcatccttgcttggtgggaaagcccgccgtattggcaacagcaaacaccctagccagagtaaacctcaatttatgtttggctctattttctgcctctaccctatgcttgctttcagatcataaagcttcttgggagaggaactttcccccacttgccacaacgcctactggaattaacctgatcattcctgttgtgattaatgaacagataggccatgtcttaaggcgaaattgaacaattggctgccagagcgcttcacatcagggcttctcagccttgacacttagtgatatctggggctggatcgttcttggtggtgggggccatcctgtgcactgtggaatgttcagcagcatccctgatctccacccactctatgccagtaacaccctcctggttgtgaaaaccaaaaatgtctacagacgttgccaggtgtcccctgggggacagaatcacctgattaagaagcactgctgttaacaatcccactctttcagaaagctgggatatgacctcaggtggagctagccaagcatctagttcctttcctccctcttaaattcttcaccttaaattatcagttggcaaccatgaaggagagctcgtcttcaagaatctacattgagggtaatgtggagcacaaaggaaaaagacaatccaagttcccactgaagctgtaaaactgaggtttgcagtgccatgatgccattaatttgttcacagggaagaaaaacatgaccgtgtcccctttccccttaattcaacaagtcttggaaatcttattgtaactttcaaggatttcatcatacaaataataaatgaacgccaatttcacttgagttcatgtagatggaacacaatgggtccccagaccctatctgggaatctttgcagagttacactgataatttagaatgactgtccatgtcaagggtgagaaaactaagtctcagagtgacttgcttacgatgatgttggttctggactttcttgggcacacatgtcacaagcataatgaaaagcttgctttaccaaaaggcaatgtgttggctcagaggactggaacacttattgtgaggctcaaagaaaggcaaaaagagataagaaagaagcagagctgcactttgctacctgctgcctccctgtctgtctctctgtctctttctctgattctcttccacttgtctttggaaacagcctgtcacctcatggcagggaggacatccctcagcccagatcccttgtgccgtagtgttggaaacagcttcctacatttcccagggaaggactcttacaggctctgctcggatcacaggcacatctctcaccaatacttagtccacagtataagccactttgcttgttgtggcctgagttatgtgtcatggaggcaagcagggtctattaccaaaatatagagaataggggaatggggaaatgggtgctggcagccaaaaacaacagctacttacctcagaaccgagatgagagtccagatttgaattcatgctcaccattgccgtatttactgaatgttctgacacaaatatctgggaaaaaactcacaacttatcattgtgaattattcctgaattgcatccatgccaacatcccaactgaaatattatactacagttttgcaaaatactacctctggggggacctgggcaaagtgtaaaagagatggctctgtgttatctcttacaactgcatgtgaatctacaattacctcaataaaaatttccattaaaaaagtggtaaaaacccaacttaatgtttctcatactacaagaaaaaagcattattcccaatttgcagatgaggaaactgaggctcagagaatttaaaaaaaaaaaaaagtgccttggaaatcttcaagcccggttctaactccagagtgtgagctcttgacctctgtgttttaagggcttccgtgaatctcaggttgtcttagcaaccatcccagggaaacatcagcctggttctctggctccctgttggctctgagtacttggactaggctaagggaagagtggcaggaggcatattgagagacacaggataggggcagagggaaggcttcctggaggaggtgttgctaccttactagcagaagttggggccaggcaagggcacagagctaaggtccagaagagggagggaatctaccttcaaggaacccagcagactctctgtggctggagcacccgaaggtgagaggagtgggcaaggacgctgaaggtggagcatggtccaatcctgtaggacccagtgaggcatgctcagaggttggaaatttacccagagggcgacagggaggcaccaaagggtttgagctggggaaaagagtttctttgtaagttttgcattttggaaaggtgacactggctgcagcgtggagaataaatgggaggagaccgtgtgtttattgagcacctactatgtgtcaggcatggttccaggcactggggattcaagagtgaccaaaacatcgtacctttccccgtggagcctgcattctagtagtcatgcaagcagtaatcaaataaacaagtacatatattcagtaaagtaaacaggattcagtgagtgttctaaaggaccatatcgtagtgtaagggcagaggtgatggtgggatcgagagctgttttggcctgaggggtcatctcgaagacttgagatgatggtggtctgcactgggggagcagcaagaatttagttttgtttcccccagtggcacgtgtcaaatcgtggagaaaggggatgtcggggctggcggtcttggggctgaaacctctagggtgcccacgctccctttgctttagagcggctgtcgagccgatataaacatttaaaagtggatacagcttggctctcattcagcatgtaaatagttgtcaaatcttcagttttgaaaggactggttccctgtgatttgtataaattttgaaacagagtagaggccgcacgcatggaaaaccagtctctctaccctagggatgaggccagggtttcgaagacacagacctttcagatgggaactgcatcccaaaggtggagacgagatggaattaatgaggacaaggaaggaagaccaaatgtgtccttcgcccaacagacacatcatcccattagcaaacaagaaactcttagagagttggtgctttgaaactctcagattaaaatgcactttgattttagctcccatgtttctcctacctcttccaggtgtttagcattgagtatattttcttttgggactggcccctgcaactaatcttttctgaaaaatagactttggggtaccaccctatggatgtaaagcaaagagtctcagcatgtagtgtcactgagttcaatgtatgtctttccccctctatgacactgacaaagatttaaaggatggcaaagctcgtcgttggggaagacaaagggaaactgcacctgttcaaggcagggccaactggaacaatcttttctgatggcaatttggcaggatatggcaaatttttattttttagagagacaaggtctccctcttttgcccaggctagagtatggtggtgcagtcgtggctcactgcagcctcaatctcccagattcaagtgattctctcaccacttcagcctcccgagtagctaggaccacaggtgcacaccaccacatccagctaattttaattttttttttttgtagagatgagtccttgctttattgatcaacctggtctcaaactccaggggttcaaatgatcctcccacctcggtcttccaaagtgctgggattataggcatgagccaacaagccttgctgaaaaattaaaataaggttacacctcaaaactgagctaggaatcatagcacagaaacaaccgaaatactgagcaaatagggtaatataaggatgtacactttggcataatttctaatacttaaaaaacaatacctcaactaatcctcaattggttaaaaagatgattatacctcccaacactaggagacactttgcaactgcatcaaaataaggtggaactcagccagctgatcgagggcagcaacagtgaaaagtcatattgatagcatgtacttctgaaatgatctgatgagaagacaccctacctctgtggtcttcctcccccaaacccacaatcagtctcatcatgaggaaaacattagacaaatttcaataaagcagcatcttacaataaagccgaccagtactcatcaaaactgtcaagatcattaaaaaaaaaaaaaaaaggaaagtgtgagaaactgtcacggcccaaaggcgcctaagaagatgtgatgaccaaatgtcatgtgggattctggatgggatcctggacagagaaagggcattagataagaaccagggatgctgggcgcggtggctcacgcctgtaatcccagcactttgggaggccaagacagccggatcacctgaggtcaggagttcgagaccagcctgaccaacatggagaaacctcatctctattaaaaatacaaaattagccagacgtggtggcacatgtctgtaatcccagttactcaggaggctgaggcaggagaatcacttgaacccaggaggcggaggttgcagtgagccgagatcgcaccattgcactccagcctgggcaacaagagtgaaactccatttgaaaaagaaaaaaaaaaaaaaaaaaagaaccagggaaatctgaataaggtacagctttagtgaataatgatatatcaatattggttcattagttatagtaaacgtgccatactgatggaagttgttaataataggagacattgagtgtggagtacatgggaactcccggtactatctttgtaatttttctgtaaatccaaaactgatctaaaaattataatttagccaggcgcctgtaattccagcacttcgggaggctgaggcaggaggactgcttgaggccaggaatctgagaccagcctgagcaacataacaagaccctgtctccacaaaaagtaaaattaaaaaataattagcctagtatggtggggcacacctgtagtcccagctacttgggaggctgaggtgggaggattgcctgaggcagggaggtcgaggctgcagtgagctgtgattgcaccactgcactccagcctgggagacagaggaagaccccaactctttaaaaatatgtgtataaataaaaaaattagaattacaatctatttttcaaatgaggtagagtctacggatggatgtgagggttgttcaagatgtatgattgaatgaaaacagtgatctcacttttgtaaaacaaagttgtgtgtgtgtttctttaagtacagacagggtctgaaaagatgccctttgcatcataagagttaccttgggtgtttgcagtgaaaacaagacctgggaggggaaataagtattgggaggggatcttctacactactagtcaatgttgagttttttctatgcatgtgcaaggcttttacaatatctattttcaataactatatttcaaacacatagacacacgtggtgaaaaagcaaccccatgatgtgctgggggaaggtagaggaagtccagttgtctgcttcagaatcattttgcctaaataggtaccatattcatctcccttgattcataattcagaggcaacagcatggaagaactagaatactctcaggtttctgggcacataaaaatggcattatttctagaaagtctgattttgtttttttgttttgttttttttttccttgtttgtttgtttttgttttgagacagagtctcactttgttgcccaggctggagtgcagtggcatggtctcagctcactgcagcctctgcctctggggatcaatgattcttctgcctcagcctcctgagtagctgggactacaggcgtgcaccaccacgcccagctaatttttgtatttttagtagagacggggttttaccatgttggccaggctggtttcgaacttctggcttcaagcgatccacccacctcagtctcccaaagtgctgggattacaggcatgagccactgtgcccagccttagaaagtctcatttgaccagcatctgtggatgctgtcactatgcagccatccaatggcttgctttggagtggctgccatttaccaaacactccctccgtggccaacccagagaggggcccacacacgccctcccttagtcctcaaaatgatgttcaaggtaaattttgtcaccactacttttttacatgagagacccagggaaagttacttgttacccagccagtaagggaaggtctgggctccattcagagctgtccaactcgggggcccaagccttgaaccactcgctcctgatcctcagggtagaagccattacaaagggaactgctcgcctgaacatgaagtcctcctctgctagagacacacattgtcacacagatacttccagtcccacagctttctcccagatgaggtccctgttcaacaagatggttccaatgagcttgactctcctctgccattgtttatatttctggtggaatattttggccctataaccaggtgcacatggaattttagtaacaatcaaaatgtccaagggttcatgagactcagcatgtgcttggctaagatgggctgtatggaaagtatatgttcgccaacaggatttacattttacttatttatttttcctgaaatctcatcaaaataaaaatcaaccaggttgccccgaggccctcactgatgtgtgggaggtacactgaatgtaattcacagctgggggacaaagagcagcacaatggcactttgtggcagagcggggctaggtggggtgcatggaccattctcaggaaggcagggggcctttctctcctccaacccagatggcctctggagagaagagcaagtgtccaagagacagcggattggagcagaccgactgtcaagtggagtcaggcaaatcttgtgggatccatgtttcatgcctcccttaaattttgacctaggctgggtgcagcggctcacacttgtagtcctagctactcgagaggctgaggcaggaggtcacttgagcccaggaggtcaaggctgcagagagctgtgatcgcaccactgcacaccagcctgggcaacagagcaagatcccatttctaaaaaataaaaataaaaaattttacctttaatttccacagcttatgccaagtatttcactttcatatgtatctgtccccagataccgtcagactcaccgtgcacccaagacaaaccatgagtgggaccacgttttttcttaaatcccccctgacatgtcagctggtcacatggtcttcagctgagaatgcccttcctttagacttgtcatatggcacggagattctgcaccttgattctctcccaccaaagtgcttttgatgagggagctcagagtgtattcttggatgagaaggtctgcttccaattgggagtggagagctttgcctcctatccggtgccttctccttcctgggtatgtagaaaatgtcacatgattccagtgcaaggaactggaagctgatttcctcggctgccctcactgacaaaaacctaagtgtccgttcaacacatttctgggaggtgttttcatttttttgcttttttcttcttccatttttattgttgagtttcatctggtgcaaagatttccactagagaagtgatttggagtattgcggcatttcctttcttaattaatcccaactggggctttgtctacagaaagcatctgaggttgatggcttcatcactgtgcagcgggctcttcctgctgcatttgtaaacaccagccgggccacagtgctccggccccggttctggtttgaattaaagccccggctcagggagcaacccagctatgctttcctgtaagctctgtcagttttccaaagcttgttaacacgctcatataaaaggaaataggacgaacttcaaggaatttacaactggtcttaaacttcaaagacgaaagctacatctatgcaacatgtgcacacaaaaccagtatgtccctccatcccctctctccccagatacaacctaaccagcacaaaacaaaacagaatccaaactcataaaagtttgcttagcaaatcagggatggctctgtgggtttgaaaccttgtgtcacagccccagttacaacacgaggcttttgtgcattgtgaaacaccaggcaaaattagtaagtctgatggaagacatgataaatagttctccagcccttgagagagtgatactcaccagcccagcctaaaagatcggctcccttgttcttccccaaagcaaagctggccaggtgggttcgtctggaagggagggcccgaccatcctcatcctcctcacctgccgcctgcccccgcccgcccggcctgggacaaggctgagcatatccactgcctggtgctgacacaggggcttgtgatgagcccaggagggagaggtcggggcacgttcctcagcagagggtgattcatttcagagccgtctcttggagatgtcgacaacaaatagaaaggcacaacttttaaaattccctttgaatgttctcctttctccagtgagtatcagcagatccgatttatctcagcctgcctgggtgtggatgcctaagcccagttcaaagattctcgttagcttcctttgagcgtttccaaattgaaacccaaataattcaactgaaggccccattcatgatgcggcgggggtttgctcagcgcctcatgaattgttgcatgcacacagcaaacgcaaggccaccggcgtggggctgctttgcccgttgcctttctgtcttccatgctagagctatacatggtgatcgtagcacttacgggcaacagtgacaactggagcaggagaattctctgctgcgggggccgccctgtgcagagcaggatgtgtagcaacgtcctcaatgccaggggcaccctcccctccccaacttgggacaatagaaaacgtttccagatattgctgaatatcccccgcgagtagagttgaatgacgaaatacagatgctcagttacatttgaatttcagataaacaacaaatacttttcttctgtcttgtatcttacatactttggagcacacttatagtaagacaggatttggtgtttatgtgaaattcaaattcaactggtcaccctgtattgttatttgctaaatgtggcaattctactgcaaaagacataggagagccactgacttaggagaaacaacaagtctagtttctggtccaccccattcttggccgtttaaattcctcaagctttctttcttcagtgtaaaatgggatcatgatgtctgtcccctttcatcaataaaaggatccaatgagagtgagctgccactgtgcaggtgaatgcccgagtccgtcagtccctgccctgtccaagcccgagcctctcggggggtcgctcgctccttcccatttggactccagtgtgggaggtgggtgggggccgcacccttggctcttgaccaatcagagaatcatatttctctagagacagggattggctgagggaggccatgtgacctgagcagagccaatgagagacaatgtggcttttgctgggactttaagagagaggctcctgtcctgatccccgcaactgagcctggaagctgtaagatcagagcggctgccacccagccaagcacagctgagacagggttgatttttgatggagctgtacccaaagccatctcctcctctggacttttctgtgcctaaaccaatgcattctctctttacccaaatcggttggagttgggggtctatgccacacaaggcacaagcagcccagctgattcacgtgtgagatggtttccccacgccttgcccactctaagtgttcagtaaacgttgagtaggattgtaacattctgctgctgttatttcttcaatggaactacaatgtcttcaggttcagaggccacatcttccctcacattggtttcctcgtgggtaaaccagacgcctggggagctggaatcagaacgactaaataaaggggtggatgggcggctatacagaaggaaagacgcatgggcaaattgacaaagggcattatgggatgcaaaaaaaaacaagcaagaccctcctccttgagaagctcttcatgaacgatcactgcagtgattcccccttttctgcatccagccacctttgcacggtgactaattccaagctgggtacccccaaacccagctcccacctcagggcgtttaccctttctggaacaccctctccaagttctgcttgtggctcgttccttgctattcagatccacattcccatgccacctcttccaggaggccctccctcatcgtcccagcagctgcccttcctatcatgctcccatgctttatttcacttggggctactatcaccatccacagtgacctgcccacttgctaaccctgccaccgtgtgagcgccatagagacaggatcttaatcctcactcactgccatgtcctcagcccctagattgagcacatagtagatgctcaataaatatttgtcgaatgaatgagttatttacacatctggcttccgtccctggagggcaggcaccttgtcttacctgttttgaacccccaggtttctactcaatgcaaataaggcatcaaataagaccttagtacatgagtgttgaatgaatgaataatatttaagatgatgttagtttctgaagaacccaaagcaacagaaagctcagtgtggggctgcatctctcagcctcctcagggcatctgccactgctgaagtgacctcctgtctcagcagcatcggcggcaggattacagggcagggtcggagcctcaggtctgctgttgacattgtgattaaggcggggaacacaccagggcctccctcatagggcggaatgagcgttaactggagcaaagcaggtaacacgcttagaactgtcctatcatgcctgccacagagaggcgtgataggtttccatttctccacacatccctgcatccatcctcctttcgctccagaggaggaagcttcctccacgaaggaaggtacccgtccaaggtcacacagccagtgagaattttctcagcacatccaagaggtgacccgccccccgccccttgcctgacacctccctccccacccccacaccttccggtttccaccccgggctcatttgtctgcagttaaatcctcagggacttttttctttcccccagggtgggcacattttattttaaacagaaaaaaatgacaaagtcgctcataaatcgagctgtttttcacactgtcctgtctctgacaggctgttagaaaagttgggaggagaggtgctactgttatacttttgttattcggtgctaattagaagagagctgagcgctgggatggagaacagtttccaaagaggcacttattgttcccattcgaatgaaaacgccttcagattaaaaaacctctctcattcctgggtgctgcatttccagcaaaatactttgttttgttcttaaaattacctggtcgatagaataccatagacatattaaaatgtgttagaaaataatcttctaaacattcctgttagagtacttaaaggtatctgactgcttcttctatagcaattgtaatgaagatgcagagggaacgtgtgtttgatctacggaaagacacatctgtgtccacagactgagcagaagaggtagaggggagtctcctcctttgtgtggggagacagggtgctaggaggaaagagctttagctgagaagcctgaaaagggaaaggggggtgccgggtgccatggcccacacctgtaatcccagcactttgggaggccaaggtgggcagattatgacgtgaggagttcgagaccagcctgaccaacatggcaaaaccccatctctactaaagatacaaaattagctgggcgtggtggagcacggctgtgatcccagctacttgggaggctgaggcaggagaatcgcttgaagtcgggaggtggaggttgcagtgagccaagatcatgacaccgcactccagtctgagcgacaagagtgaaactccatctgaaaaaacaaaaaggcgggggatgcaacggacatttttttcctccaaagtccactgtgtgtgcctgttgccctgtccaagctgcgttccagccccaacactgctgctggatgtggcagtgttttactgaatcctcacatctgcccatggggtgcacgcttattgtcagaggcgtttcaaccacagcaaccccatcttgaataggagcaggtaaaaagaggctgagacctactgggctgcattcccagatggttaaggattctaagtcacaggatgagataggaggtcagcacaaaatacaggtcaaaaagatcttgctgataaaacagtccgcagtaaagaagtcagccaaaccccaccaaaacaggatgacgatgagagacacttcaggtcgtcctcactgctacactcccaccagcaccatgacagtttacaaatgccatggcagcatcaggatgctaccctatatggtctaaaatggaaaggcatgaataattccccccaccttgtttaacatatcatcaagaaataaccattaaaaatgggcaaccagcagcccttgggatgctctgtctatggagtagccattcttttgttcctttactttcctaataaacttgctttcactttactctataaactcatcctgaactctttcttgcacaagatccaagaaccctctcttggggtctggatcgggacccatctcctgtaacattatgattgttctgatttctataaaggagaaaagtaaggcttacagaggttaagtaatgtgcctaaagtcatacagcaggcaaatggtggtaccaggatttgataccttccaggctccggtgtaggacagtggagggttggatcccagccagtgctcatgtttttggcttcgaacctgggcccccttccatggtagcattattattgcccaattgtacaggcgaggacagggagactcagagcatcccatcccagttggaggccatgcagcaagaaggagtggagctgctacaggaaaggggtccagatccagacctcaagagaggattcttggctctcacacaagaaagaattcaggaggcatccacagagtaaagtgaaagcaagtttattaagaaagtaaaggagtaagagaaactgagggctgctgattgcccattttgatgattattttttgatgatatgctaaacaaggggtggattattcatacctcacccccctttttttctttttgagatagagtcttgctctgttgcccagtctggagtgcagtggctcaatctcggctcactgcaagctcctcctcccggttttacaccgttctcctgcctcagcctcccgagtagctgggactacaggcgcccgccagcacgcctggctaattcttagtatttttagtagagacggggtttcaccgtgttagccaggatggtctcgatctcctgacctcgtgatctgcccgcctctgcctcccaaagtgctgggattacaggcatgagtcaccgtgtccggctgcctcccctttttagaccatataaggtaacttcctgacgttgccatggcatctgtaaactgtcatggcgctggtgggagtgcagcagcgaggacgacaggatgtcactctcatcgccatcttggtttcggtgggttttggctggcttctttactgcaacctgttgtatcagcaagtgtttatgagctgtatcttgtgctgacctccaatctcatcccgtgacttagaatgccttaactgtctgggaatgcagcccagtaggtctcagcctcattttacccatctcctattcaacatggagttgctcttatttacatgcctctgacagaaccttcatacagaatgggcccccagctccaggaaggaggaggcacaaaaatgcagtggagaataggagccccagggggctgggcatctccagtaagtgaggctccacatcccagctggacaacctcaggcaatgacttaacctctctgtgcctcagttcatcactacaaaatgaggataataatagttccttcctcactgtggggttatgaggctccagtgaggtcacctatgtcaagcacttcacagtgggctggttccccagtattgcacaccccggggaactcctgctgttactatttgcctgattctaaagccacaccatcctgtgcaccaggatgctgccaggagctctctgttatctagacgggtcctcttgagtgggcaggccacttgctccaggtgttggtttctcccagtgcagagccagtgcctgggaacagatgacctcaaaggccctgggtggatctctctgtgctgccactgaatctttgattctagatttcattcatttgttcaacagtgccagaaacagtgcaaggctctggaacaaacaacagtgaccttcgttaagttgagtcttatgtgtgcaagaatagagattcacgaagcagataggagtgatcagccctctgaagccacgtgccttctgcctgcctctctcaggagggaagtggtgtttgtcaaaacatttattttgcaaagtgctttcacttcttccctctagggcagtcctcatcatgctcttctaagctacaaggcaggctgggcaaccctcctttatccccatttgacagataagaaaacaagtccgtagaagttgaaatgatttgcccaaggcgagggagctaataatcaggtgcttgctcccacaacatcttccccgaccttatcatgccctgtgaagtgatcattttggtcatgtggtcattggccgggtcctaggaagacgggtttctatgcatgtaatgagaaaaatgtgttggtagctcttcaactacaatttatttcagtctccttaaattctagccaggcaaaaggctgtgatccccaaccctgctgcaaaccactcagtgagtcaaccaataaaggcggcatgaactttttgtttgtgcctggaagggcgataaaacccactcacaacctgtaggcacttattcacaccttcagggagtggcagaactatcaaagtcagtaacttattgagcatctactgttttccaggaatttactgtttgccagattagagggtcacgtcacttacttttcaccagattaggaattcacttacttaatttacatttctagatcacggagaggaagctttgtgagatcgcacactcctagagttgccagataaaatataggacaaatacaatttataaaatcattatactgcaaaattatttgtgttcatctgaaactcacatttaactgggcgtcttgagtttttgtttgctaaatctggtaaccctactgagatcacacagggcacttggatgagactgagatgatgggactcctcagtctccactctccaccacagcgaggtcagcctcccagctgcttcgagaaactgatggaaaaggagggtcaaagccaaaggctcaggtggccgtccatccctgctggctcagggctcagagcttttctgggctgtggctggccgttcagttctaaagccagaaaagtcctgggcaaacgtggatgagttggtcaccctagcaggggctccagctgggcctgttgcgggggtgggtagcactgagccaggaggtcgtagagagcgtgataatgatggaactgatcctaaatcctgcatgagacaaactccttcccctccataatcagtcaagagccatatttccccacctctaccatccacttagaatttcaggaatttctcggtatcctcatacaacctagtctaataattgactcacctttctcagataaatgcatttctttgaaaagaactactctatcactaccatagatgtaaaaccagcatcagttcccacaaatataagatagccataaaaataaatttgaaaaattgttaaaacgaaaacaagttgttaatcagggtacacctagaaattaactcatgtgcccattggtgtgaataccaccctctgtgccagatgaaggtgtgccttgatctaaggagacagaggacaatgaggctgctcttgagaacaccaagtgcttccgaatggaagtagttgcagggctgtgaaaaaggaaacatcatagagaaagccaggaagccttcctgaaggaggcagggcttaggtgatcttggagtcagggcagagtgtggacaggcagagagaggcaaggcaagccttccttgtcagatttttttctgcgggctggtctttttccacgggctccttttgggaaggtcctcgttttgtgaagttccaatgtgcgcagatgtcggtcacaacgttttggtcaaataactccagttctccaacaacacggttcaattttaagttaccacagtatgttaactgtgcataattgcataaattacaaacttccctgctagcttgacagcccacaaattactatgtaataacaggtgcacatcgcgatccatgaccaatcatgtcaccacttcaaagtctgtcaaagactggtcactgcccatctgtattcagttcatacacagacagcaaagcttgaagttgcattgcctccttgtttccccgtgataagcccacatgcattttataaaagtgaggaatccaaagagagaatcagggacaaagatgaaagtgcagctaagaaatgaaaagcagtaatgctaaaaatgacatttggattgaacataaatggagttactgaagaaatagctgatgatggaaatggtggctcagatctaagggtgatgcaaagtcttagggcctttgagtcctgaatcagagactgaaaaatctagatatgccaaattcacagcatatgttctattactgccgtgtaggcacttgtggtagacatcactaatcaattctagcactccacagggtgcagaggttacaaaggttctgctccaaaacctgactgcctggctttgaatctaggatctttcgctttcaagctatgtgtcctaaggcaggttatttaacctggctgagcttccattcccttatctacaaaacagacatacaaaatgctatctcacagagttgttgtgagagtaaaatggaatatgtgtaaagcacttgatattgtctggtatctagtacaactccatatgtggtagctagcagcaatagcagcagtgctgccaatccaagattcagctacagaaatcttctcagcccagagcaacagacagtcactgttgaatccgagctggaaggggaggtggaatctgcttgccattcctgctgtgatccaaccatgcagactctgccagctgaaacaacaagcccatggtctcccagagagctagaagccttgggctgtgttctggatcacccctgtatcaactgtgcctccccagcccagcttacctcctttccaaccacgctgaaaggctctcagcatgggcttaggatgctgaggccaggaggatccccaaggggatcttttggtttgagggcattttcataagtcttgaatcttcccattcaggcaagatctctggtagtaatgtttagcttttgatgttaagggctaatggcaccaaagtgcttgtcttcattggcctctgagtttgaggtgggctgtgggcagtagtgagagaagtgagaaccggaagcctttgttccaccccgggatgtcccagagatggacagcttctgtcttcttttgcagagggtcgagcatggtcagggctggcaatgccacctgaaccaagaaccctgccttgctgagcagggctcttgctcagtgttgcttcccagggatgagtctttccttgttgctatcggtagtgaatttcagagctggtgcctgcaattgtcacccggttgagcagacctgggaggcagaccatgggcaaaagacatccagagacaatcatataaggggagcaaattgccaggaagtgtggagaagctgggtctttccaagctgggtacacatctcacttgtcaaacagcctcggagaccccatgccttagccaggctctcaggtaagcccaagtgtgaatacaggtctggtgcatctgttgggcagcaacttctttgcttcacacccaagaacaaagccacccagaagcatggcaaattcactccagcttccaaggcagatgaaataagaaatcaggaactgggctgggaaaaagagagctcccaatagaaatagcaacagagacaatcatgacaaagtttgcttctttgggagctttctcagcatatttgctgtttattgagtgtttaatatgtgctgcacactccctaattatgtgtattttacttttttaacccgcgaggtagcaccatgaaatatatcatggtgtcactgtcttaaaaatgagaaaacttatgctcaggtttttgacatgcctagatcacgcagtcctggtaaaaacgagactcaaacccaagtcatggtgcctcaaagtcttttccattccccctgtgtgatctcctggatgctggtcctgtgtccagcgcctcttataaccatacttaaaggatgcgtataggtctttagtagatagaagagaggagaaggtgtttcaggtggaaggaaaagattgagaaaagtccaaggaagtagaaattggcacagtgtttagtcactatccaggaatagtctgctttgatcaaatggtagaactaaggatatgccagaaataattgccaatagacaggttgtgtttgagggtcactggtcttgaagggtcttgaaagttcaacaggggtgttgcagttggatgcagtaggtaacagcaagtcatagttggttcttgagcaggaaagtggcatatagaacaataaccttggaagactgctctgactgccccttgcaggatgggagacagaaggcaggaaggattgcttagaactgtgccattatcacaaacgatgacaagaaggagatggctgaggaagtaaggtgcatctttggaaaacactcagagaaacaggttaggtcttatggcaggtttgctgtggtggccctgttgcctcctccaaggtgtgatgaaggaagtgcatctgaaccatttttgctatgagttgtgagggccagcctgcagaggtctactccttcccctgaatgtggttgtctagaactgaacctgaaatgcccatctcatgaccacccatgaaatgccatctcacgaccacccagaggtcagtggcaaattcactccagctttcgaggaacactgcccaaggcaaagccaagaccccgaggctggcagagcagagaaacagaaagaaccagggtctgatgtcatccctgagatgttccttctgcacctggaaacaccctgtctctcaacttcatgccatggagataataacattcctttatttaagttaggggttcctgaaactcgtgtccaaaggcctcctgacagagatactgattgtgggagtaaaagaaaaagcttagaagcagagacagtccttgctgagtgggcatcaactagtctgaataatcccacattccaacctacctggtcaaggggtgaacacctgacttcgagaccgcctgttcataagtctggccaagccaataaaatttcctgtcatggaaacttgaactaagagactcagagaagagattccatgtagggtagacccttgtgctgaaagattaggttgttgtaagtctaggaagtcaaggctggatcaagctgaagatgcatatgttgaggaagttagttgggaaaagagagaatgaagcaggtaggcagagataaggagagtagaaagagaaacagagagagagagagatgaagaaggattccaggagggacagagtcagagttgagagaacatgttactcctaagacacatatagagtaggttggctcctggcccccagtcccagttccagagggtgcagtgtatttcttgccttcagaatctgtgcattccccaacaatgtccctttagcttgagctggattgagtggtcttctgctccttcttcaaaatcggtgtgagcagaacacctggaaccagcccttgtgttgttcatcactgtgtccccagcatctaggatggtgcctggcacataagtatacaacggatggatagatgagtgggtgggtgagatggatggttggatagatgggtaggtgggcagatggatggatagatggatgaatggatgggtgggtgagatggatagatagatgggtgggtagatgagtaaaacggatggatagatggatggatgggtgggtgagtgagatggatggataaataaatggatggatggatgagatgaatggatgggtgagatgtatgtatggatggatgtatggatggatgggtagatgagtaagatggatgaatgggtgggtagggagatgagtaagatggatgggtggatgaatgggtggatgaatggaaggataaagatgaatcggggctgggtgagatagatagatgaataaatggatgaatgggtaggtgagatggatgggtggatgaatggatgggtaagatggatgaatggatggtaagtggatgggtggatgcatgggtgggctttggaggggatgtggaaaggcagggtctgatgtggggtcagatgcccccaacacccaccactgcagatacttcagctgcaacaatcttaactgagacccccttatccctgttggggccctgacactgtgctggagccatggtccttaatcacctggggactggttaaagcttagacttctgggcccacccgcagcatctctgattccttgttgggggtggggctaaaatattgcatttctgacaagttcccagatattagtgctgctgatctgggcactccacccagcaaaccacagtgctagaggaatacgacatctggtgatgcagggcaggcaagccccagagttggcgcttagcctgggagggttcttggctttgctcaggaaagaattcaagagtgagtcggtgctagaagaaaacagttttattgaggcaacagtgttacagctctgtgactgctcccgcagagcagggctaccccccaggcagtgtgtggggagctcagggacagttctgcagttatagtatacccacttttaattaaatgcaaattaaggggcagtttatgcagaaatttctagaaaaagggtggtaacttctgggttgttgccatcaaaagaggcggtaacttccaggtgttgctatagcaatggtaaactgacatggcactggtgggcatgtcttatggagaggggcttttgccttttccctgtttcagccagtttccaatctggtctggagtaaactcctgcctcctacctcactggtgctctcccacagccttcacggtccagctgtgaaacacgtaaagaatgggaaggtggggaggagagctcagttggaataaggcaggcctgggctaggtgcacccccaaaaacatgagcccttgaccccagccagtcccaggtctcaggagcaccctctctgacaaatttatttcctcattcactactgactgagggtcagctgggctctggaatggagaagataaaatggtctgatgtaagcatggagctcacagcctgcaatctgcatgaggtgagggcaaatactcactcatgaaatgtccaggtgggaggaagctggaggggagtggtgctccacctagaaccctgcagatcccttttactgttcccacatgcttctgctgaggtaggaggctggactggactccagagacagggctggacaccagaatgaattgaggactagctaaaacaaagacaggggtggaaggagctttctatgagacacgcccaccagtgcaccacatcagtttacttttgccatggcaacactcgggagttactgcctcttttcatggcaatgacctgacaacccagaagttattatccatttcctagaaatgtctgcataaaccaccccttaatctgcatgcaattaaaagtaggtatgaatctgactacagaactgccctgagatggtactctctgtctatggagtagactgctctacaggaacaggcacagagcggtaacactgctgcttcaataaagctgttttcttctactctaccactggctcaccactgagtacttttctggctgaagtcaagaatcttggtgggctaagcctcaatttagggctcacctgtcctgcatcactgcctctgcacttctctttccagtgactagtcttcggagaactaattcaggctatcagaactacatggggcaggtccagagatccagaagtacctgggagtctataccctcagggtggtccttacccagagaataactggtagggcttaggagagcttgactcctggcgcctggtcaggaaagctccctggtgtgaattatggcccagagtccctgaggggtcaggctgcagccactcttcccgggctgcctggagtctcgcctttgcttggcttcttctcattcttggcctgctgccctcacttcccaggggtctcccctgagagcatgtccttaatagatcacttgcctgtgagtcttggtgtcagggtctgcttctggggaacccagcctaggacaaaagccatgtgcaggagttcagaggcagacacaatggaatgaagagaaaagccagggacaggcgtctggaggaggaggcagaggcgtgcagagtcaggatagtgagaggtccagctgagcatgggctctgagagtcatggagtcattgggggtgagttactacaaagcgagatctccatccaggcttcttcttccacagaaagcaaaatccagcctctgagatgcaaaggcaagccaggcacatttacagaggtttcataaagtcctgtatggaggaaaagtgagagaggtttgggcttataatttatttcagaaacttttcatggttgcacttggtccagtagagactacaagaaaaatgctagagtgaagttgtgagctcttgctgctgcttgagctgtttctgcagagaagctgggctaatgccatcctgtgtctgggaaaactagcgggtcctgtgcagggcagggctggcttgagtattagagctgatgacagccatggcctgtctagagcagtcactgtggggatgccagctgcagcaagggaggtgcagctggggccgcatgctccacggagccaacagcagccgggaacaggtgggagccccactcactaccatgttggcggtgtggaagccccacgttcccaggcgcaattgcagctgcccagccatagctccatagccaggcattcctgtgctcctggggacctctgaagcaccctgccatgcccctgccttcgcccctgcccccacaggctcggaagtgcctgctgttactccctggtgtctccctgctcctagtgcccactccaatttcagagcaaagttgtagccgagcctgagtgctgttacaacccagctgggtgggcacacgcttggggtggtgctgacatgccagcccctcatgccacctcggccccctccagactttgggtgttgatgagcgcagaagggaggctggtgtggggctgagggcagctcagcataggcctgcaggcacccctcagtgcaaacagcctgggtgttgtggatggcatgttgatggcaagaggcagacaggttcctgggtggaaaggggtgggtcccagtgaaacctccaagccagggactgcctgaagcctgggggccaagctgccagctccaggtggagtccgtggtctggagagaaaacttatggtgcttttctgggcctgtccatggctacctatggaccaatcaacatgcacatcctcccctctgagcccataaaaaacccagactcagccggactcacagagacttggggctaccagctgccggaaggagctacccgctctgggtttccttgacctgtcagaacacctgcctgtggaaaggagcttcccactgtgggtctcctctccgctgagagctggacacacatcaggacaacctgcctgaggataggagctacccactttgggtctcctgagagctgctgttctgtcactcagtgaagctcctctctgctttgctcactctccagttgtccgcatacctcattctccctgggcatgggataagcacttgggacctgaggaatggcaggactgaaaaatctgtaacacaaacaggactgaaacatgccccccacttgccatgttgcaggcaatgagaaaaagaaaagagctgtggctctttggggatcccagatgtaggaactactcaagccagggctgtgacactgtctttgagtctgtatggttcctggcatctccaagtttccaggcaccaccatgtttcccagtgcccacagtggaagcagcttgcagtacgcctggtccagctgcagcctcgcagggagctggtgcctggagcacctgccttgctgaagcaagcatgcctggccagactccatgctcactcacacacccctcaccactccatgcctggccggactccatgctcactcacacacccctcaccactcatgcctggctcacgtggcatctgggctagtagcatgagcagagagcagtctgccagtctgagtgggtggaacgagcccagcaggcctgagcaaaactcaggcaaaggagccacgggccacagagatttcaagctggaaaagcgacccctaaggatcctgtgacccctaagccagcagagttgtcatcaaaaggacatcctggcttccaccctgcctttcccagtgtccatttgacaactgatagagactccacccatttggtgcctggaaggctaattgtaggggatggggaatattccagaaataaagaaaaagggaaatataggcattcctttgtgttcccagctataattatctgttcagaggttgcctcccaccacctgggggcagagcagcgtggaaggaactgggggaggcccttgccaggaccataaagatgagctcagcttccaggaggttccctgtaggaagtcttgctttggcaaggtcgtgttccttttattcctctgtatcattgactgaataacgttcctctgaggaaactgttcccttttggggatagacagtaacgatagctaccattttctctatggctcatgtactttgtattttagtttcttcacctcaaaccaccccatgatgatctcattttacaggtgagaaaactgaggttcagcatggttaactaacgactgagggtcacacagctgacaagtgggggaaccgaaaattagaccttcaagttggcaggatgtggccacttccctctccaagctcatccctccctgtcctctcccttactagtgtcagccacggttccttcctgtgtcttcaactcagaaatccctttccggcctccaggcctctgcctgtgccagtccctctgcttggagcactgttcagactgactcatgttcttcaatctctactcactcattaggtagaaaagagtcttacctgttctcatctaagtgggtgccctgatcccctgcttcctatacatacctctacatcttttcctttacaaccattattctagttgcaattacctatatatttacttattgatctttcattgtctgtctccccaagaagggtaagaagcattgattttttcacatcccactctgtttccagagctaagcaccatgcttggcacatagcagatgttcgaaaaccatttgttcagggagggaaggagactgacggtcttgtaccctgctttccaggtgcttcgtgctgagtaactgctgtctacctgtcagaggctgcacttgctcatgatgtttatttttataccagcacagagcaatgcgtgttctctatggcctggcctgtagcccctttggtgagggcaggagaggtggcatcccatcctgtcacatccatgggcctcctcaggatcagcttttccttagaaacttcctcccacatgaatccacccagtcctcaaatcctaactgtatgtgttaggaatcgcattctggggtaaccaactgtcctggtttgccaggtgttgaggggttttggtgctaaaactgggacaatcgcaggcaagccaggatagttggtcactttacagatttggctgctgtgaacagaagcctgtaaaagagtggcttaaagaaatgacgtaaaaggaaaaggccaggactggaaggtggcttcttaatactatcaaggacctgagctccttgctttctgtcctgctatcctagaggcataatacccacactcaaggtcacctcatcgtcccaagatggcagcagcagctccagtcatcataccctcattctaggtgagaacacaaggaagtggaaggtcaaagaggagaggcacctgctgaattatccccctttaaagagcttcctcagaagctccgtttgggacatctactcatatctctggccagaactgtatcacatgaccatttctagcagcaagataagctgggaaatccagctttttagtagggtgcattgttgccctgattaacatatggttttgcttgtttcgaaaaaggccagactacatatttggtaagttgggtgacagatgcattgtggtttacccgggaacttccccagttttagtactgaaagtcctgcatcccaggaaactccttggttccaggcagctaggatagttggtgtggttggtcatgccactggtaagtgatctctagtctctaacacaccaacccccctcaacttggcaatagcagctgccttagggacgctgtgttagatctctgtttagtgccttgacatccaggcataaatcaaacatcaaacagctcaagtgatgcataaaaaataatttcaccatagcccaggtgctgaattatagcagttgagctataattatttgatacatatctgcgaagctgagaaaattctgcctcaattaggaataaagttaagcttccaaaattttctctgaacagttctatctttcagggagaagtttccctcctttgcccacgttcacttagttcggtttttttacatcctaaaactctagttggcaatgttcatgataataacattgagtttttgcaaaagctgcagatttgaagggaagaggtaggaagtgggaaatggaaaacatccatctttagaataacataaatgtcttataaccaattgtgaatgctaccaggggcctcttagcccaggaaaggggtggacagagagaaacctcagccagcatgaacaatgaccagcaatgatcagccgcctcctgtgtcagacactgggctgagagacatcttcggcttgctgcatcttcatgaccacgctatgctccattttacacctgggggtacgtaagcttccagaggctaaataatttgccaagtccacaccactaggaagtcgatggtgaagcttgggtttacaccctcatctggctgactccggagcctggttactatatcctgcctcctggaaagatctgggtttggccaaaggagaggcacatatacagccccccagccctggccagatccatcccagctacatcctcagagtggaatgtggaaggcagtttgtagcttctggcaatgtataggtcttcccaacgctctggaacctgaaaaatgccccatggtgttaaactaacaaatgtcattgtgttttttgttgtttctatttctttctctagagtgcttggtatctggtctctctgcaaccatggcccttctccaaggccaaattcacagactctagaagttgcaatgtaaggtttagcaccttttaaggagacccctggtgatttcccaggagaggctcctgaaatcctcctggtctaagttgcagtgaagatgcctcctggaggcctgatgcctgcttcagcacccctctgcactcttcctaggtgctcctggtctttgggcgtttgttgaggaggtgcctggggttagactgggtccagaggatgctctgttgatcatgcttgttgggaaccccacagctcctgaggctagtgacacacacagtctccactgacccctgagtcccagctggaatgggggtttccaagtgtgatgctgagccttggttccttcatctaagaattaggtgacaagagtgtctgcctcacagggctgttgggaggattaactgagatggtgccagtcaggtatcaggcaccgtcttctatatgacacagtgcttgttatatggaaggctccataagtctcagccttcataatggtaatggggaagaggatgaggaagagaaagaggaggaggaggaggaagagaataaggaagaggaggaggaagagaataaggaagaggaggaagaaaagaaggggaaatgagggagagataaaaataaagagatcatctggtcgggtgcagtggctcacacctgtaatcccagcactttgagaggccaaggtgggaggattgcttaaggccaggagttcgagaccaacctgggcaacccaggtctctacaagaattttaaaaattagctggacatgttgttgcacaccagttgtcccagctatttgggaggctgaggcaggaggattccttaaccccaggagtctgaggctgcaatgagccatgatcacaccattgcactccagcctgggtgatagagtgaggccctgtctcaacaaaacaaaacaaaacaaaacaaaggacaacaaaaagagagacgatctgagatcattgctcaatttctttgactataaagtgggaataaggctgagtgccgtagctcacacctgtaatcccagaactttggcaggctgagacaggtggatcacttgaggccagaagttagagaccagcctggccaacatggtgaaaccccatctctactaaaaatacaaaaattatccgggcgtggtggtgcacgtctgcaatcccagctactcaggaggctgaggcgtgagagttgcttgacctcgggagggggaggttgcagtgagatgagatggcatcactacactccagcctgggtgacggagtgagactctgcctcaaaaaacaaaacaaaacaaaataataagtagaaaaaataaagtgggaataataacagatcatctttcaaaatgttgtagaaaagatgaattgacatgacgtctgctaagtgcttaatattgtgctcggcacatactaagtgttcaataaatcttagttatgacaacactttaagcttcaacaaaatcaggataataagtcaccttcttcataggttgtggtgaaaactcaagatcacgtatttgaagtgaacagaaagtgcctggtacctgtcagacctcagtacattgtcactattattcaagcagaggtgaggaactgtccttctgattgagcatgtggcctcaagggggacaggagctgggcctgggaatcttctggagagaatggaactgaattattgcccggagccggtggagtcttccaggcagaagcagctctcagggggcaatgtctggctgctcctggcctggctcacgacgggctgcagcctttgtggcaggcctgtcctggtggcaccatgtctccctctccatcctttagttttctcgccaaaggccggggaagccagggccagtgtgagtgctgcctctgggtggtctccacagtgcgggcggtgactccactgcccccagccccttgacatctgccttctgtagagcacaggttgtcaccagttgacacttacacaagccagaagcaggcccggcccacactcattgccataataaacacacgcggtagtttctgagagctgagctgtcccatccatcaatccagcgtgacatgcaaagggcccccgtggtgggagtcgtgacttcaaaggtcagagcctgacatccaggtgtgtgcatcagggatgctgtgtgtcctgggctgcagtggacggcggaggtgagccatggggtctgcgtgggtgtgagagtctgcgtgcatgcatgtgtgtgtgcatatagatatgtctatacacataggtgtgtgcacatatgcatgtgtgtatgtatgtatgtgtatattcgtttgtgtgcatatgtatgtgtgtgcatatgtgtaggtagtgttcacgtgtgtatgtgtatatgtgtgtacatgcatgtatgcatgtgtgcacatgtatatgtgtgtgtgcatgtgtgcaggcgtatatatgtaggtgtgtatgtgcatttatgtgtctatgcatgtatgcctatgtgtgtatacatgttgttatatgtatactcatgtgcatgtgtgcgcatgtgtatgtgtttatatatttatatggttgtgtgcatgtgtatatgtaatgtgtgcaaatgtgtgtgtgtgcaggcaagcacattagatcaggagatctcaattcaaacatgttcagccgccagcaaggttgtataaatgtgaaaatgggatgggatagagagaaagtgactctggtccttcaaatatagggcacatatggtatagagtgccgaggactgtggcaaacaggaagcctgtatccctgagtgcagcagatgcaacctcgttgctgctgcatgaggaatgcggatccagtgttaccaggaatcctcatttttcaagagaagccagaaagctggatttttatgtgaaatggcttgatttttaagaatctattgtcagcccattgaaggagattgttaaatgtctcctgggtcaaagaaaacacatgtgaggcttgaatttggcctgtggacatccagtgagcagtcgatcgccactgtggtcatttctttctgatgtagaagggactaccctaccaagctgggcttttcccagaagatcctgcactggcttggaggaatggatcctaatggggtggttttgcccacaggaggcatttggcaatgcctggagacagttttggtgatcaaaactgggtcgttgttgttggtggtggtggtggtggtggtggtggtgcgctcaatactggcagctggggtaaagccagggatgctgctgaacatcctacagtgcccgggacaacccctagcctaccccaagttaaagaataatctggcttggccgggcacggtggttcacgcccattataccagcactttgggaggctgaggtgggtgtatcatttgaggtcaggagttcaagactagtctggccaacatggcgaaaccacgcctttactgaaaatataaaaattagccaggcttggtggcaggcacctgtaatctcagctacacgggaggctgagacaggagaattgcttgaacccgggaggcagaggttgcagtgagcaaagatcatgccattgaactctagcctgggcaacaagagtgagactctgtctcaaaaaaaaaaaaaaaaaaaaaaaaaaaaaagaataatctggctctaaatgttgacagtgaagtgaggtagctgagaaaccttgaattagaatcatcccgagggtgatttgagaaggccagcttctggttgtggaaattcctcacttatgagcagtggcctttaggagtcagtttacacctgatttaaaatgtcctccaaaggtcatctttccagcctagtggcctgtccagtgctttcctgacatgccagccccgtgataggtgtgtcacatgtctgaaatcagcaaacctctcaactcccaggagacaaaccacttttatccccattttacaggtgagaatactgagacagagaaaaaccgagcaagagtctgtggtcacacacacacatacacacacaccacacaggaaagttggtagagcctggatgtactttggacagtctgactccaaacccacccccttaatgacaggtctacactgtgagaagacatggactgaaattgttttgcattctcttgcacatctgagagtttgcttgactgctttttatgcctggaacattcttctcttggaaaacacctacttaactttcagggctcagttctaaaagctccttctcccgaacgtttccccctgaggagggactaggtcaggcacccagtctggggttccttcaccaacaaggtgttttccctaacagagatcatttctcatttactgtgattgcttcagtttctgtcttattgtggcatgagcatccatcacagccatgctaatacctggcacatgctaggcactgactaactgttgaatgagcggatcaatgaatggatgggtgtttccttgcttcccaattagctttatttctgaactttgcagttgagtctttttgatgagctaggcgctgttctaagtactttacgtgtattaacttgctgatctttgcaacagtcttatgaggtaggcattattactatccctgtttattctcatttactcaacttcttaggcaaagagaagttaaggaacttgccaaagtcacacagctagtaagtggcaaggacttcttcagtggctgccgcagtgactttctgcaggcctgggaacagagctgagctttgttcttgtcctaactctctggatctccagataagggctcagtgagcttatattatgtgactcaggacagattcacatacaaacaactattttaccgaacatctacaatgtggtgggcattgaattaattgaagtggttatattttcatgtacctttgtcatttgtatctcttgtttaagtatttgcttgtttacatcctattagtatatttgactgtctgttattgattagcaattactctttacatattaaggctctacacaatatgtttgtcacctttttcatatttccccaatttagttatttttcaacttgcttatacttttttatttgctattcagagtttaatttttaggtaattaaaaatgttttttatggttttagtccttagtaccatgctttgagactctttttatccccaagattataaaatattaattcatagttatttttctattccttttagtttcactatttacattatttgtttgcttgcttatttaacattttaatctttggtccaccaggaatacattttgccatatgaggtgaggcgagaatctcagtttgtttattcaataggtctacttttacactcccaagaaaaactcattgctttgactaaaataggcagccaaaaatgttacaacgtacagttgagcagatcagctcataaacctacttgcccttcagtgactgagagatagcatgccgtgtgtcttaaccatgtaaccggcggatgtgatcacgttagactctggatttttgacagatgatgcttttttaggcatttacttggaggagatacagatactccagacaggacgtttgcccattacacagctgcccctgcactaactccccccacctcaccttgccacctgtcaaattacccctttattcacacgcctgctggggaccccttggtacattaccagtttttaaaatgtgatatcagttttggtgatctgattggcaaagatgaacgaggtcaataactcctgctgtggcagctacggagggaaaagggccgtcttgatcctcactgttttgaatgtgtaaagtgggggtaaggtggaggtagggggctctctgcagagcgacacccaggctgggcactggtcactgtgttgtgggccttacattctttcgctaggcctccaaaccaccgttaagaggtaggaactatctttaagtccatttcacagacaagaccactaaggcacaatgaagtaacctgcccaaggtcaagtatctggtaactacaaacccaggctgcctggggtctacactacagccttgttcggtttgcagtgacagccttcaagtcctgcttactctcaacccaacaattgtctctataggattgatcctagggaaagagttgtggatgggtaagcagatttgggatgaggctgtgtatcagagggttgttttttgattttgtttttgagacgaggtctcactctgccacccaggctggagtgcaatggcatgatcacagctcaccccaacctctgcctcccgggctcaagcgatcctcccatctcagcctccgagggtagctggagccaaggcctgtgccaccatgctcagttaagtttttgtttgtgtttttttgtagagacaaggttttgccacgttgtgcaggctggtctcaaacttctgggctcaagcaatccaccctccttggtctcccacagtgctgggattacgggcatgagccactgtgcctggccagggtttttttcaacagtgaaaaattggaattaacctaaaagcccatcaatagtaaatcagtaaattctactatatagtattgcatatcctggactgtgatgcagtttttaaagagttataaaatcgatatgcttttttgatacatacaattccaatatatcattgcagtttacaaattataatgtatggcatgatgtcatttttgttactaaaaaatatacaggcatagaaaaaaaacgggagttggagctggccttgccggcctcagcactagtgacattttgggctggacggcttttcgttataggggtgtgtcttgtgtggcatgtttagcagtatccctggactctatccactagttgccagcaacatttctcactactgggggccctagttgtgacaacaaaaaatgtctccagtcattggcaaatgtcccctggggggcaatgtcacccagttgaaaactactgggttagggccgggcgtggtggctcacgcctgtaattccagcactttgggaagccgagaccggtggatcacttgaggtcatgagtttgagaccagcctggtcaatatagtgaaaccccgtctttactttaaaaaaaaaaaaaaaaattagctgggcgtggcagcaggcacctgtaatcccagctccttgggaggctgaggcaggagaattgcttgaacctgggaggcggaggttgcagtgagccgagatggcggcactgcactccagcccaggtgacagagcaagactccatctcaaaaaaaagaaaagaaaaggaaactactgggttagaacttcctccttgtctcctccctccctccctccctccctctttctttcttttcttccttccagtttctgctcaaatgttatctcctaagaggcaattcctggaccgctgctgaaacagcgcccttccttccctgccagcactctctgtcccttgtcctctgggccttccctgatagtgcacagcacatggccctatttattttctgtctcctgcactggattggaagctccccaagggcaagggccttgtcttgttcccttctgtatatttcctggctgaggacagtgctccgttcactgtaggtgctcagcaagtgtgtgttgaatgagaaaatacctctgtgccgagccagcattttcaaggccctgctgtgcaccaggctcgctttaagcgctttacacccatgaactcatgtaattcccctgaaacttctgggaagtgggttccattattaccctggtttacagatgaggaaactgagaccaaaaaggttatggtgtagctggccaaggtgacatctttctaggtagctgagcaggatttgttcttcaaacgctgctaagatgaacatgcaggatcccacagatccttgcacattggtgggaggaaagacattggatactttctgcatgttgggggtgaaagagtcgtgcattttaaattttgagtgcagtgcttaagagctttccctgaagccctcctcaatttgcacttcctccaacagtgtcctgaattcattttagtagaagagacatgagaacaccaacacacaataacacggtgttctttatttttattatcattatttgatacagagtctcactctgtcacccaggctggagtgcagtgtcacaatttcggcccactgcaacctctgcctcctaggttccagcgattctcctgcctcggcctctcgagcagctgggaccacagacgtgcgccaccatgccaggctaattttttgtatttttaaaagaaacgtggtttcactatgttggccaggctggtctcaaactcctggcctcaagtgatccgcccaccttggcctcccaaagtgctgggactacaggtgtgagccaccgtgcctggctgacatgatgttcttattgagagtttgtaggtagagcacagggactctctgagctctgagggacaggagggggttgtcgccaggctaggctccccacttagggatgcttgtcctggtttgctcttggaacccaagcatccccctaccccaggacaatggccacaattcagactgatagcactccgagctgcctggctcattggtggccacagcgtgctcatctgcccactggttttcagtgtcacagtcagagctgagagtggccacctaagggcggggctgctgctgctgctgtttgtccagccactgagcaagggaggaggggggacatcaggatcacaccaggccttctgcccagaacgtctccccctgccttcccaggaccgacccttctcaccctccaggtcatgactgggctgctccctcctccaagaagcccactttgaaaccatgcatctgcagtgggttgaagggttcccccaagagacacgaccacctgaaacctcagaatgtgagcccatttggaataagaatctttgcaaatggcaaggttcttgagatgagatcatcttggagcgtggtggccctgagtccagtggcgagtgtctttataagagatggaaaaggagaagaaacagagaggcatgaggaaaaggtcgtggggccgcagaggcagaggctggagcaatgcgtctgtaagtcagggaagccagcagccagcagtggctcgggggaaacatagatcagactctctctcaccacctctgaaagaaaccagtcctgttgacattttgatttccaacttctgtcctccagaactgcgagaaaacaatttttttttcaagccaccagatttgttatggccactccaagaaataaatatagtatgcccacctccacataccagctttggcaatttggggcaatttggcttgcacttaggcaggttacttctacccctcagcctcagtcttcccatgtgagaaatgggactttagccacacccgtgtgctgtcgtggtgaagactaaatgaggtagtaactacacggactcatctgggagcctgccacctggtaagtgctccatgaatgttagctactttttttttttttttgatcaatctagaatgtgtccccagagatcctgagttagaatcgaaaccaaggtcaaagcacattctccatttggttctgtgcacagtgaggtttttgggccatcaggttccagcacaacaacaaaaacatggaaaccacccaatgctcaccccgaggggtgggtcactgacctcatggtgcaagggaatcacgtgcagccactgaagggacatttagaaaacatttttgcccagcgtggaggctcacgcctgtaatcccagcactttgggaggctgaggcaggcggatcacttgaggtgaggactttgagaccagcctggccaacatggtgaaaccctgtctctactaaaaatacaaaattagccgagtgtggtggcgtgcacctgtaatctcggctacttgggaggctgaggcaggagaattacttgaacctgggaggtagagtttgcagtgagccaagatcgtgccactgcactccagcttggggaacaagagcaaaacttcatctcaaataaaagaaatttttttttgataatacggaaacattcttggtaataacattaagtggctaaaagaggtatagaaaattgtatgtgcagaatgattacaattatgcagaaataaataccacgtttctgttgagagaaagaaaacacacaaaaaagtcacagggaagcaatttaaatccatacatatgggaaggagaaaggaaggaaaaaggaagggaaaggagaagggagcgggaaggagggaggcccacaagagacgcaggagtagccagtactccttactgctgcagtaacattaagccatcacaggtgtgtatcgcaattaagctcttccgaaatctttcccatcctttattccaacccatttggcagttttaataaactctctgagcttcagttcccttatctaaaatgctacctgcaaacccagctgcactccactttgtgctcatgggcaatctccttcatttctattggcctctgttttccaatctataaaatggggatgttaaaagcactccctcactgagtggttgacaccgtctcagacctgggcctggcacatagtaggtgctcaataatctcgagctgctgttatttcatatgggacacgagcctggtggatcactgctggcaaggccaactccttagggctgtcttctcgtcctctggagagacccaagggttgagaagatcccctggtaccccacagacctccatggccagagggcagatgagaaggtgggagagggcacccattcagtgttcccaccggggacagcctcatttcatcttggcacaagacaacttcctggttcaaagaccaaaggccttgaaaaagaaaggagaaagggttcctggacatcaaatgtttcttacaaacactgttttgatggtttaaatgtaaacaaatctgaaacatatggattacatttctcctgaagggcttaaaagttaaaggggaaaaaagggagttgtctccagccaaattcatgttgatttttgccaatctccaggatctttgggaaataattggagacatgtcctcacaccccaactagtgctaagctgtagctttttttttaattgctgttatgactcactgttgagttggtgattatttttatccagttaatgaaggtaatctataaattaccactgacccagattcagattcattatttaataagatttaaattacacacccaagttcgctcagaagcagcgggctggagcttctttctgaacagcatctgtttgttctcaaaagtcctgatgctcagatgttctgatcaccgcctccctgcccccatttgagcgtgtggcctatatagtgtgacatttggggccacctggccagtttccaggccctgttcctgcacatgctctgtgagtattggccctggaccaatacgtgggaattcccaaggctgccacccagcttctgcctctgtcaaacacttgcagggtgcctttgggcgacctctggtccctccgtgggccttggtttctccctgtatggcacgttctttatgggggttcttagtaccgttacaccaagttagggtttcccaaggcgtgtcccgtggggccctggtcccacgggtgctgtctagaggggctccttccttaaacacccttgagcatggctacagaatccacaactgtagattcacaagggcataccattagggtcaaagtcaccatgtcagaccccctgaaaaggtcatagattccagagagctcaccctctcctgcctgctttctgccttcttttacccataagggtccttttacccaaagggcctggtcaggacctgaccctgccttctcagtccctctaagggctccccttgtccttaaaatgaaatccactttcctgagcttgcaggggtctgcagggtctgcacccagaggcagcttcatggacaagcaacctgggcagttgcacagagggactccatgcttgatttaatgctatcttgtctcgtcttgaaattctttctaagtttgcctgagaggctctgcaaatcacgtagccaatcctgccagaaccctagcacaccttcagcactgacctttccctctctctgtcctttttgctcttctgcctctgtgctgactggaccctaagccctgagtgaatgtcagtgtttgaccaagaaacactttctctgtagggcttctcccctcttccttcagagggacctgttcatccttcaggtctcagctcagacgtcacccctcagaaaggcctttctgtcctccaccagcgactgcattaagcacgtagctcatccctgtgcagcactattgggaaacacctgattggtttccttgctcactctttatcctccctcaccacgtggtgagcatggggagggcaagggccttccttccttgaggacacagcccatgtgccccccacacacggaagctcctgtcttggtcaagaaactggctccatttccccagccaagcatgtctcatattcctgtgtctcctgggggaggtggggtgttgagccccagctctgagctccagcgggagcaggtggtgaaggaagagataccctgctctggggtgcacccccaatacctggacttgttctgagctcctgcggggagtcccagccacagtgactcccaggaccctggaccttcttccctcccctttgctccttcttgcagctcctcctacccccatcctccccgaaccctttttctgcccttcaagcttcattgcctcaggactcccttttatctcatcagtttcaaagctgcctcccaatgagatgatcacggtttcctttgccccttctctgggccctgccactgggggctgctggcatgggagctttcgctagtgtccctggatgcttattttttcaccgaacaattatctctttttttaatgggcaaggctaagtttattaaagtcgcagaagcgagtagatgtaaaaggaccatattaggaagtgaatggcctgggcacaggctgaaccaggaccacagaggctgttctcaagacagcaggaattaggaaactcagctcactccccctcacccaccccaagcttctcacactggaattcccctcggggtgggggcgggagagggggggaacagtgaagggaggtgggtgggaaccggtttcaagtcaccactgtctgggaaaagggctgcggccttgagcaaggaaaatgaccaacttgtccctgtttgcctgggactcctctggattctacatcccaagtcccaggttctgggaacccctcagtcccaggcaaaccctaaaaagggttggaacaggctccacctcacactgctgctccctggggcacacccggagaggccggctctctcccagcccctcccctctcagcccctccccgtccccctcgccttcccgtccccatccccctcctcgtggggaaaagcttcagccagatttccacacccacctgcacagggccctcctttgccccctgcaaatgtcagtgtgtcctcattccccttagagcaggtccacggccggaggctgcccagaggagactgggggtgtctgtgcctgtgcatggcggcgtccaccccagaacccccaaatacatgcatataaagctctgaggagcactgtggccctttgctgacagtcaagggtttgcatctggtggggaagtttgttttgttctttttttcttcattttatttgtatttgttgtgaaatacacagaacatgaaattggccattagctacttctgaagagtacagttccaccgtgaagagctcattcccattgttgtgcaacccatctccagaactgttttcatcttgcaaaactgaaactgcaaacccattaaacactaacttctcatcctccctcccgctccccctggcaacccccattctccagtctgtctctatgaattcgacaactctaggtaagtggaatcatacggcatttgtccttttgtgccgggcttattcacttaatataatgtcctcaaggctcattcatgtttagcatgtgtcagaattctcttcccttctaaggcttaagtaatatttcattgtattagtgggcgcattttgttcttccatctacccttcaatggacctttgggttgcttgcatggggaaggtttttaatttttcccctccctgggcaccaaagctgagatagacaagggcatctagatgccctaggggaggggcagctggagtcccggttaaaaagaggcaaggaggaagagaatgtgctggaggaaagaagagtggtgagaggaaatgaggggcccagaggaccccctttgaaactggcagtggattccctgtaagagattatcagaataataatcattattaaagcggttgtattgcctggacacttactgtgagccaggtcctgttgtaaagggttgatgtgtgttcatctgctgtgttctcacagcagttctctaaggcagatgctgttattgttctcatttgacagatgaggaaacggagacatggatatgtcaccagcttatgaaatctgggctgaaaaggaaagacctcgacatattccaggggtcctcagctttcagccacatcagagtcacccacacagctcgttgctttgatgtagacttcagcccaccccggggcgtgccatccagggcatgctcatggggctgggctatgggagaaactctggcttgacagagcagcctcgtaggaggggtggagatggggaacccgtcatgggctgtctcagtgttcaatatgtggagcatattcagaaagggctctttttcctcaaaacctattgctgagatttgtacattgtgccaggcatttgcagaaacagttggaccttcagcaagagacatcatttctgtcctgagcctgatgcctctggctgtaaagtggagtgcatgactcctgctgtgcatggttttaggaaaggccccaggaacagctcagtgaagcagcagcgccatgtctgaggcctgtgagtgactgctccctacacgttgtttccacgataaccaaacaccagcagagctccctgtagcctgtggattttctgtagctggtcacctgaatggctaagcccgtgttactgcccggtctcttctggcaggatgaacttgaatgtgccagcgctaaccctgttgcctactggaaggaaattaacccttctgctaccagcctggggcaatattttatggagtttccttctttcttgagttggctgggaaatggaaagaggggtttaggctgacggtcttttcctctttttagcaaagcagtacatgtttgtggtaggcagtttaggaaatgcagataattagaaaggagaaaatccacaccctccatcgcctactgtccagacacgatgagagactcttggagtttcccctgaaccgagttataagcttatccatggggttcatctgcagctcagagtttcttgttgattgctggggtcttacctcagaattttgaccccccactttggggtcctggtttggttgggcaaagaaagatgaggtatgaagagaacagagggcttttgattgtttgtcttttgagaacttggatgaagttgaagttctaatgagatcaatggacagcgctaggactgagtccccaaaagcatactttgaccctcccccgagacaaaccagttgtcatttttgatgtttttcaagagtacatgcttttgtcttccaggaaatgagcatgttggtagtaaaatcatgattttaatgggttttgtaatattaattgtcatttggtttaacacagggtttctcaacttgggcataataatatttgggctggatcatactttgtgatggggatttttttgtgcattgtagaagccgcagcagcctccctgacctctaccccctggatcccagcagaaacctctcctccgctgtccctggctcccttctccccaaaagatatctcaggacaaacgtctcctaggggacaaaatcagcacctgaggagaaactactgtcccagaaagtcccagggagggagaaggatccctacatcccctcaagcataaacagaactcaaactatactttatgagattggacacataatggtgtttttttttttttttaagaaaatagctaatcaagcaagaggactagcaataataatacaactaatgttctattccttgtagttggagactgcgtgtgtacttacctcttaatatccattacacttaattagaattagcattgcattacatttaataccatgttgccaattgtatttaactaaaaaatgcttttgaaaaatttagggtttttattttttcatccaatgatcagtttcctgctgaaggatactctttcatatcaggtataaagaaagcccttccaacagacctgaagaatgtttgctgatgaatcaaaaatagctctctaagaagaactgttccagaataatcacggaaagagactgcttttaagacagttcaaaaataagtattttattcattcaatgaccaactgatttttacgagtgcctgccatatgcggagaatttatagtagggaaatgtctaattccttataaatggagaggtgatctcctttgaagaagtaggaaatttttatgtttgaacttgtcagggagaagccagaagtaaaaggacatttaattcaatttgacaattaagatttgtcttgcagcatctcacttggccaagctcaaaaaatcatcttgtggaaaagtctcatctagtatcgtgcatgcgtgtgtgtgtgtgtgtgtgtgtgtgtgtgttcacacacactcatgctaacgtgcagaacagaggcatggaccattttgtttattatttctcgctttgctccaaaagcaaaattaattgaggattcgaaatattttttatgatgttgccataagaattaatccacccgtattgaaaacggaagaaaagaatgaatgcattattgccattttcaaccaaataacacattccattataaatatttcatgtatcttatagaacatgtggtaaatgcaggaaagaaaaaaagttaatatcatacctaaatctgtcaccccactgtaaaaaggttggtacattttcttcaagtcttttattttttatttgttgggatatacatacacatttttgagcaaattagggtcatactttttcagaattttcagttccatttcaatttctgttgtatcgggggcatgttccccaggaaatatgatttttagagaaaaatcactgacagtgactgaagcaaaaaaacaaggctgccctggatgattgtgcaggttgtgcactccacaaacctaggtgatagtgtgaatggttctacctgagaaaagatcctgccgattctaggtgcctttaaaatgtatctacacacattcacagagaacttggctgaacaaggcactccacgcttcaccttctgaacacaaaccagagtggctgcttcaggctggagtgggaacagccactgatgcaaagaggcttgaaggaacttgacgggggttgggggtgttctacatgggactggagaggtggctgcacaactgtctgaattgaagctcggccaggtgcggtggctcacacctgtaatcccagcactttaggaagccaaggtggaaggactgcttggggccaagagttcaagaccagcctggacaacatagcaagatcccatctacaaaaacacatacacacacacgcacacaaacacacacacacaaactgatgctcattgaactacatacttgaaatggatgacttttatgatatcttaattatacctcaataaagctgtttttttcttaaaggaaggaaggacaaaatccaccccctaaaaaacaagcaaaccctgggaggtgggcaccatggttattattccatttcacagaccagagatctagacccagagagggtcagccacttccctaaggtcactgtcacaggcagtggactggggtcctcagcctggtacctggctgggggacttccctctgagtccctccacatccctgcctctccatcagcccctgttctaagctctgatatgccatcaacccaggagtgggttctttacagtcggaaacctaaagccctggcatctggggctgtgtcctccccactttctgtatattctgagcctggtctgcaaaccagcctattcctgccctacttcccagcttgggtggcaaacacccgagctctcaaaattgagtttagcaaaatggaaaagcagggggaggctggactgcccttgatctgaaatgtggtgatgagagctgctcagcaccatccctgttaggccaagcttctccccagtgtacattttgaatgagtctgatttattggccgcgtttgaagggatcctaaaacaatgcggagcttctggcagcctgtctgagaacatgctcacacacagagccatcaagcccgactctgaatcacactccagagccgaacaggcatcttcaaaggccggtctgccgggtttccagcaggacacgattgtgggctgggcaccagcatggaaaaattgactgggtgttattgtcaaatgtggcaatggtttcgaggataatttcctcctgaagagcggcttctgtgattttatttctcattgtgttgccattccacggggtctcatgtgaagtcgggcctccagcatcctcggtcggtctgtgaggatttgcaggctgactcctatgggtccctggctgcgcccagtagtgatggctttggggaatggagctgtgttgggggatggggacagtggcacagagggcaagagcacagcatgacatggactcattctgctgctctgcaacctgccctcttccttctcaggaagtgcggatccacaatcagccaatgggtagcggactgcctacttctcacgcagttgcatgggctctttataaaaagacccaatggatgaacaaactctggtaccatctgacaagggaatatccagcacaaagaagcaatgagctattgagccatgagaagacatagaggaaacttacatgtatatggctaagtgagagaattcagtctgaaaaggttacatgctatgggaatctaactctatgagattttagaagaagtaaaagtatagagacagaagatctgtggttgccagggcttgtggaaatggggggatgggagggggaatacgttgacatccaggagctttttacagcagtgaatctactctgtatgatactataatggtggacacatgtcattatatgtttatccaaacccgtaagatgtacaccataaagtgaactctaatgcaaagtaagaattttggccaggtgtggtggctcatgcctgtaatcccagcactttgggaggctgaagcaggtggagtgcttgagaccaggagtttgagactagcctggacaacatggcaaaatcccatctctacaaaaaatataaaaattagtcacgtgtggtggcatgcatctgtgatcctagctactcaggaggctgggtcaggaggattacttgagcctgggaagtggaggttgcagtgagccaagatcgcaccactacaattcaccctgggcaacagagagaaatcttgtctcaaaaacaaaaacaaaaacgtatggcccgggcgcagtggctcatgcctgtaatcccagcactttgggaagctgaggcaggtggatcacctgagttcaggagttcgagcccaatatggtgaaacctcatttctactaaaaatacaaaaattagctgggtgtgatggcatgagcctgtagtctcagctactcgggtggctgaggcaggagaattgtttgaacctgggaggcagaggttgcagtaagccgagatcatgccactgcactccagcctgggtgacagagcgaggctccatctcaaaaaaaaaaaaaaaggttttatatcaaaaaaccctctctaatcaccccatctaaagatttctcctggaaatttccactgagcctttttgcttcctccataatagctttggaaatctgatcctattttatttaagtggttgtttgttttatttggttacttactgttttctccattctccctccattcaaggtaaactccacgagggtaggaggttctgtctggttcaacgatgcatccccagtgccttgaagtatctctggcacacactaggcactcaataaatggctgatagacgggatgaatgagtgaatgcacatttattgacccctactgcattggttggagctcagtgtggaaataaaaaccatcttagttcttttaagccaaaggtgttctcatgcacaccatgtggaactaggaaatttgtggaagggccaataatcaaaacaacaaccggaggctaatttccatcatgccagcccaccttacccctgactcccacaccctgccccaaggaccccaaagagacagcctcccccacagtgccttggctgtctcggtgccccctgtcttccgaattagtggcccctgcacacactcaccatggtggttaagcatcagtactgcaaggcagacaggctggggctggagctggagctggagtgacaaccctattgtttactggctgtttgaccaagctcagatttttttttcttaaacctgtaaaacggggtaaacatgggactgacccagcagggtcttggaagtattaaataagacaatgcctatcaagtgcctgagctgatgcctggccaaaaagagcaccggctatatgcagtgaacacctattatctccttctatgccaggcacggttcccagcagtaagcgggagagattaggatcctgccctcagggagctcccaccctggttgcagccaaacatgttaatctaatcaataaagcacaagggcagaggggcgaccaccgtgggaggtgaagctactttagcaaagatggtgagagaagaatgtgccatgtgaactgaagctgaaccacacgggagggagggaacagttgcagatccaaggaggctgttccaggcaggggaacagcacatgcaaagtccccgaagcagggaagcagagggctcaaggagaaaacagtaactaccaaaaggagctcactctcgacaatcactattattagtagtgattgcaacagagcaaaacatctgtttcctcacattttacccctccttctccactcctttctgttgcctcctaactactaagacttatgagttatcagatttacatgtgattcagaaaaagtctcaccatttaactactgagtttccgatttagttacctattgatgcataagaaattaccccaaaacttacatacaccccaaaacaacaatgaatgtttattatctcacagtttttctgggtcaggaatttggtagcaacttagctgggtggttccagctcagggtgtctcctatggctgcagtcacagtgacagccaagattgctgtcatccaagggttcgcctggggctagaggaaccatttctaaacgacccactttcgtggctgccaagttagtgctggctgttggcaggaggcctcagtacctttctatgtgggcatctccacagagacgcttgagtgttctcataacatggctgccacttcttccagagcaaatgatcccagataacaaagctgaagatatgatgccttttataactgagtctgggaagtcacacactctcacagtattctactggtcactaggatgggcatgattccgtgtgggaaagactacaacaaggtgagaagcccaggaggcaaagctgcttgggagccaccttggaggctggctaccatgggctacgaagcccgtcagatgggctgagttaattttctccctgcttgagccagaatcaatcaataatgctgatcagtaacaaaatcctgagcagtatccccagccaggaaagtggcggcttgtttaggatttgatacttttgccttgtttatctcacttcaagcagttttccttgcatcatgagaaatttgctgttcaagtctcgccctctgtctgagccaacctgagagaccaattcaaacggattcagtccctgagacaacaagatagaaattcataattaaagtgggaagtaaaggaaattaatctgtctggcaaaaggctataaagtaactctactgccagacacagaatctgccatgggaaaacagatgggaataataagtaaatataaccaatgccaagcagaaccaggaagggcaatttatagctacttaaataattttctcatttctttttttaattgaggctattcagaatgccagaacaagtggtgagagtgtgaacttttcgtcagcctcgactgcatgtgcagaccagtcaaaaacaaggcgtgaccactggagatcgtgtttgggaatcagtcacggtttcccaattgatgggcatggttggtaatttcacgcaaggacttggaattctcatgacctgacgcttctttgtgtggtgtgattctgtgcacgaaggtgactgggtttctgcctttgctgtttaaacacctttgctgtggcccgcagaggagaagtagtttggtgtttatgaccaaagataaatgcagttttaaaagtagcagtgtccaagttagttagaccctactagaggcaaatatacctgagatcatgaggactgggatcaactttgcagggtacaaaaaaattttcctggccaggcacagtggctcacgcctggaatcccagtactttggaaggccaaggtgggtggattacctgaggtcaggagtttgagaccagcttggccaacatggtgaaaccccagtctctactaaaaatacaaaaattagccggcagtggtggcatgcgcctgtaacaccagttactcaggaggctgaggtgggagaatggcttgaacccaggaggcagaggttgcagtgagccgagactgtgccactgcactctagccagggcaacagagtgagactctgtctccaaatttttttttccttagaagacgtggtttaatcttaccagcacatccggcatacactgctgtgtgcagtaggcagtgattttcatgactagatgagctgcactgagaatatttatcattttggcctccgttataaggtatcctcctttcggccctgaaggagaagatacaggcagtcagagtgcactggagggtaattaacctcgtccagaaagggtgggaatggggaggtctccggtggaactgacatttaagcaaaaaaaatgagttagggtcagtagggaagggagacaagacttaccttccccattgcaggggtgaggaatcagtagaacctgcatcccagttctgccctttgacataggattctagttttccccaacaacagtcagccatcagctcacagtcctccccacaccaccaagtcacgcttaggtattcactattcacacatggcagagaacaagtttccatttgaaaggctagtatgtgacatgcccagtacctagcactttctcagcacatagtcctaataatagtaatgcccccagcccccactaccatcaccccaataagaagaagtagctgacatccaagtcctgactctgccaatctccggatctcagtgtctaggtgactaactcactgaatccgcaccaccaccccacgcaggtggtaccacttccccattttacagatgaggacattgaggcctagaaaggttagataacttacccaaagatgcatctgcattaaggggcaggactgagacagtccctttgggaagtgggttcaccgcagtgacacacagccccatttcaggacttcctacgctgtgtcctccagagacatagctatcttgactgtccaaatgaagctgctttaaaaaggcacctgcagggccgggcgcggtggctcacgcctgtaatcccagcactttgggaggtcaaggtgggcagatcacgaggtcaggagatcgagaccatcctggctaatacagcgaaaccctgtctctactaaaaatacaaaatacaaaaaaaaaaaattagctgggcatggtggtgggtgcctgtagtcccagctattcgggaggctgaggcaggagaatggtgtgaacccaggaggcggagcttggagtgagccgagatcgcgccactgccctccagcctagggaacaagagcgaaacttcatctcggaaaaaaaaaaaaaaaaggcacctgcaggagatggttagagcattcgataggctacatctttggtgggtcacttggaacgtctgtctctgtatctacagatctctgtgggcacctggtaagtaccttcccccagacccagcaatagcactttctggaaagcgcccttcagatgtccttggacacaggtgtgacaatgatacacgtgcatggttatttgttgcagcaggactttgaaaagcgagggtgtgaaaacaccccaaatggccatcaatatgcttaaattaggtcaatatgcttaaattagattatggaacacctgcatagtatgatactataatattctgaaaaacaacaaggacatcctctaggtactgattcaaaaagactgcggagatatatcaggtacaacagtcagatgccgtatagagcgtataccacatgataatttgtgctttggaaaaacagaaaagaaacacgcgtgtctgtaagaagcatgggtgatcttgtgggggcacctcagaacttagcaacaggggcttatttgtctctgggaaagcgagcagagaaacctggggactcaggggctggagaaagcttacatttcctcgtataaccttttgcatcatatttgaggttttatcagatacaggtgccagcatatatatatacatatatatatattttttttttttttgaaaaaagataaaacacagcaacagctggaggggctaagagagatgtgtctggaaacaaaggtggtgagggagggaaaattccttctgagagcacacctcaaacgcaggtgtgggcttttgatgccccatttcccaagaggcgaccgccttccttttgatcacccatgtcctgtgattcccctcaggaattccctccacgggcaggtcctggcctacattgagatgacacgggtgtcctcagaggctgctggctcggccgtgcttgtctaccagagccctctgttgccccgaggcccctgggaagggtcagtgctcactatgattatagttcctgtctgcgctggtgtccatagccattaaaaaacacatccccagcggctgccacccttgcagccgcccacactctgtccagggggcacacagggctctgtaaccccgcatgacacctcaatttgggacaaagtctcaacattccccccagccagcccccgtctggctgcagatgtcctttgcagctgaccttcctctccgcccacatcgctgctctccagggaggggcacatgctttttcaaaatgagatgttgggatagaagtgcaagaacatcatttccaggaaagacgagtctctaccaggtgtgcccagacagacaggtcctcataggcacgcagagctaggaaaggaacaattgccctccatgagtgggcctggccgctgagacaccaggccattgacccctcccatgctggactcagctccagcttctgtggccacattcctcccattgtgttatcttttgggacttggtgatccctacaaaggctggccaatgtgctgagggctttccagacattctatctatgtacacatgaaataaccataagaggtagtagtgttgaaccaatgtttccacagttgggaaccaaagtgcaaagaaaagcagagaacttgaccaaagtcacagagatgtgggttgagggagtggagtcacggtttgaatttaggtctggtggccaccaccccagccttgtgatcacagaacacccaagagctccttcctacttggtccagatgcactgtccaagctcagtacagggccccaggcagccaccactgagcaataggaccgtcatctccaagagggagggacatgatctggcctagggcaacagcacctcccacagtgtgtggcactgaatgggaattcagtaaatacttatggagggaagggaggaaggaaaacagggagggaagaggaagaaggaaggaaggaaggaaagaaagaaagagagagagtgagagagggagggagagagagaaagaaggaaggaaagaaagagaaagaaagagggaagtagagagagagagaaagagagaaagaaaaagaaagaaggaaagaaagaaagaaagaaaaggaaagaaaggaaaagagggagggagggaaggaagagagaaagaaaaaggaaagaaatagagaaagaaaaagaaagagagagagggagggaagggaagagaagagaagggaagggaagggaggaaggaagaaaaggaggaagggaaggaaggtgaggaatatatcccccagtgaaatgaacacgatggcgaagtgccactttgggcgcagggttgggcgagtggagtgcctcttccataccctccccttctgcgaactggattctagaagaattcatagccacacgatggagcctgggaccctgagtccctgcctcaggaacatctaccgaggctgttacatggccacgaaatgaaccgcattgggttggagccatcatacattggggtctatttgtgacagcagggcagcccaccctgactcatggaacaggagcgggagaagctccctgccctctggggccctaggtgccgctcagcagctccgggctctgagccagtgagccggtgtaccacgcagacggcttgatttttcttcccacccgagcacgggacggacagtctgcactgggcgggcaagagcatggctgagttaatgggttcttgggtgaaactttcagagggacacaggccactgttgaactcaagttctttttgtaagctctagcccagcggtccccaacctttgtggcccagcggtccccaacctttgtggcaccagggacaggttttgtggaagacaatttttccacggcccagggcggagggtgaggttttgggatgaagcatcagtcagtcgttagagtctcggaaggagcgcacaactagatccgtcgcgtgcgcagttcacagtaagggttcgcgctcccgtgaggatctaaggccgccactgatctggctggaggtgaagctcaggcggtgatgctcgcccgcccgccgctcacctcctgctgtgcggccggttcctaggaggccacagagcagtcggtcgcagcccaggggttggggacccgctctagccccatctgacctgtaatattgttccggctcgcctttccgtgcattgcagtttccctttgaaattcaccatttgccaagggacaagggcccctctttaaaggcagaaacatatcaggagctattttagatcaggttccctaggaacagggcaagcggcttgttggggtgctctcaggagaagaacaacctctaagggagagaaggaagcaggagagggagaggaagaggccaagcacagctccggctcagctggaatctacagccagcctgacccacggggagctctggggcatgaatggccacacgtggtgtcttcctaccttgaggcaaaggagcgggcttttgtatccccatcgggtcatgggtgctcaggggagaaagctcaggggagaaagcatgtctctctaccccggcatctccaggcaaacggcgtcaatccctgaaggacaattgtcttaggaagattgcatgtgaagctcttatccacagccctagagctgcgggggatgcatgtgccgtctacagagggacgtctgggcagggaacttagagcatatgctctaagagtattggtgagcgccctggggacggggatgaagagaatgcagagagagagccggtgcatgctggccagacacttgctgggtactccatgctatttcatttgaccttcacgacagttcaaaggaagcttctatcattgttattgttccattctacagatgtggatattgagtcttagaaagataaaaggatttttctaaggtccctttctagaggttgaaagaagcagagcaggaatttgaactcaggccgatctgactctggatctgttaccactgcagagctctgcctccccgatgccagagagcagcgtggcgggtctgcgctgggtcagagcagagcaaggcaaggtctcttagccccttgacgcttccataccagagttggcctggcctttgtctccaggctcggcaccaaccaggaaagctgctagcagagccgctggtctggccagagactccacccagttgttgcagacagggtggggtgtgtggtccagtagcccagttcctctcactggggatcctcagctgcagctgccttacaggttgtgcagtcacttctgactcagaggctgcccagcctcccggtttgctgattctgcaaaataaacagtcctgagctgctgcttgcttcatttggaatgcctggtcttcctgggagtggtagaggacaagagtacgtttaggacgctgtgagaaattcactgacggaactggtctcccccaaactgcaaaatatggtgctgagggtgtgctcccagggaagctacactaggcagactctcaagctagactgcctgggctcaaatcccaggcccatctctcagcagccacatggcccagggcaagtcactgagcctccctgagcctgtggataatcaaaggcactttccttgaggagtttttgcaagagttaattgagataattcatggaaggtgcttagtgcttattaatttttataatcatgattttaaaaagcaattctccttgcatttaattcaacaaggtttctggaagaccttattttaaaggatctcccagccttgtgagagagacaggtcactggaaaatctatgaaatttggctaaggccaaaaggacaccccctcctttatcaaagtactttagagatgttatttcattatgtcctggcctccatgggttctgaagagaagttagaagtaattagcatgtaacgggctgtttttcctctggctgattttaggatcttctcttcatgtttgactatagtgtgcctaattattgttgttgttttcgtccttcttggggttcactgatcttcttgaatctgtaaatgtatgtctttcatcagatttgcaacatttcagatatcgtttatgatttttttttttttttttttttgagatggagtctggctctgtcacccaggctggagtgaagtggtgtgatctcggctcactgcaacctttgcctcctgggttcatgccattctcctgcctcagcctcccgtgtagctggaaatacaggcgcccgccaccatgcctggctaattttttgtattttttagtagagaccgggtttcaccgtgttagccaggatggtcttgatctcctgacctcgtgatccgcccacctcggcctcccaaagtgctgggattacagaagtgagtcatcgcaccaggccatgatttttttttttaccctattttctatgtcatctccttctaggtctagaagagtcagtgttagacctttcaatgttgtcccataggttgcagaggctctagttcaaatttttcaaatcctcttcccctgttttcagattggataatttctatttatttatcatcaaaacaagtgactcttctgccattgccaatcttgttgttaagctcctccagtgaatttaaaaattcagatttttttatttctagaatttctatttagttccttttttatagtttttgtttttctgctgagatttcttacttgtttattacatgcttactgtcatttataatccttgagcatacgactggcataaaatccttgtctggtctgggcacggtggctcatgcctgtaatcccagcactttgggaggccaaggcaggtggatcacctggtcaggagttcaagaccagcctggccaacatggtaaaactctatctctattaaaaataccaaaattagccaggcatgttggtgggcacctgtaatcccagctacttgggaggctgaggcaggagaattgcttgaacccaggaagcagaggttgcagcaagctgaggattgcgtcattgcactccagcctgggcaacagagtgagactccatctcaaaaaaaaaaaaaaaaatctttgtctggtcatttcagttctaggttattaagaggttgttttccatcaattgccttttttcttaagcatgggtcacatttacctatttttttttgaaggcttactaatttttagttgcattctaaatattatgaattgtatatgtagagattccagatgctgttgtgtttctctgaagaatatttatttattatttattttctaaagcatacagttaacttggctagactcaaactataaaattgatcccttctgcagtggtccatggctaaaatatctgttaagttcttttaccttgctggacttcttggattctgactttcagtcttttcagggattagctagagaccaggtcaaattttaaacaaataagttagggctccttctctctgcttctctctgttttggaattcctccttcctttgaagtaatttgagaatgtgattgtcccaaactccagcctatggttcttcaactcagtgaaactgtggcttttttgtcatagctttaaccctcttgttctagaagtgggtcttgggctatgatctatatcaaaggcaaaaaactacacaatgagaaagtcaccctggttattccaagtgtcagctgccttccagtttctgcctagttttgctcactgcccagtgctctcagggaatcgttactcatgctttgtccagcatctgtggttgtcaccagaagccagaagtccacaccatctcatttcacctctgcatgggatgagcatatggacactcagagaggtgaagcaaagcacccagtgcttcccagctgtgatgagcttcttagaaatatttgctgagtgtctacatcctgccaggcactgtgctgggtcctggcaacacagccatgagctacttcgacaaagtccttccacccagggtacttacatactggtagcaaaattggatgataagctagtaaaccctctaataaataggataaccatggaggatggtaagtaggccaggatacgactgtgagggagaggagacagctttggtttggtggtcaggcaggtgacattttagatgaaataagaatgaagtgaagggatgaacctgtggatttctagggaaaagctttccgtgcagaacaccatccagagcaaggctatacgagggacaagtttggattgctgcattcaaggaagaaggaggaggtctgtgtggctgcagccgtgtgagccagggcgagaggaaggacatggagcaggcagggacagacgctttcctctctgatatggtttggctgtgtccccacccaaatctcattttgaattgtagttcccataatcttcacatgtcgtgggagggacccagtgggaggtaattgaatcatgggggcaggtttttcctgtgctgttctcgtgatagtgaataagtctcatgagatctgatggttttatcaagggcagttcccctgcacacgctctgttgcctgccaccatgtgggacatgtctttgttcctccttcaccttccaccatgattgtgaggcctccccagctatgtggaactgtgaatccattaaacctctttttctttgtaaattgctcagtcttgggtgtgtctttattagcaatgtgagaacaggctaaaacaacctccttcctctacagcttctctgtgctcccactcctagaacttatcgccttcccagctgcacccaaccccaaggaccacttttgcagcaaccaagtgaagatttaggagcctggagaatctgatggcttgaatctttgagctcctcctctctttctaagcccatagagaaggttgagagaattgaatgagacaacacacgtcaggcactaagaacgtatgtgtttaaaaagtcagtacaacaatagatgctggagaagatgtggagaaataggaatgcttttacactgctggtgggagtgtaaattaattcaaccattgtggaagacagtgtggtgattcctcaaggatctagaaccagaaataccatttgactcagcaatcccactatgggtatatacccaaaggattataaatcattctactataaagacacatgcacatgtatgtttattgcagcactgttcacaatagcaaagagttggaaccaatccaaatgcccatcaatgatagactggataaagaaaatgtggcacatatacaccatggaatactatgcagccttaaaaaaggatgagttcatgtccttcgcagggacatggttgaaactgagaaaccatcgttctcagcaacctaaaacaagaacagaaaaccaaacaccacatgttctcactcacaagtgggagttgaacaatgagaacacatggacacagggaggggaacatcacacaccagggcctatcagggagtagggggctagggttgatgggtacagcaaaccaccatggcacgtgtatacctatgtaacaaacctgcacattctgcacatgtatccaagaacttagagtataataataataataataataataaaagaatgtatgtgctgaatattccttggtgcactttacatttgcaagctaatataatcctagcaataaccctctggagtgggcattattattactgttgtttcattagcttatttcacaaataaggaaaccaagactcagagaggctaggtggcttgtccagggccacaaagctagaaaagaactgggggccgggcacagtggctcatgcctgtaatcccaggacagtgggaggccaaggcgggtggatcgcttgaggcctggagtttgaaaccagcctggtcaacgtggcaaaactctgtctctacaaaaaatacaaaaattagtcaggtatagtggtgctcgtctatagtcccagctactctggaggctgaggtgggaggattgcttaagcctgagaggtccaggctgcagtgagccgtgattgcgccactgcactccaggctgggtgacagagtgagaccctgtctcaaacaaacaaacaaacaaacaaacaaagattgggatttgaactcaggctaattttaccactgtactttattggctcttcaatcaagacccagcatatcataagctaataagtatattaattctaagtctgagctaatgtgtttattgccttaaaaattgacatgataggaagacattctcctgcactatgaaacaaaagagaaggaaaaaatttaacatgacatttccattcaactcaacactgtgtttatgctgtgacttcaaaccccttaaggcatacacccaacccccaggcccttagaacagggggttcaaactagaacccatgaacccaatccggccttcctcctgcttttataaatcagcttttacagaatatggctatgcctgtttgtttctggattgcctgtggcctctggttgctgccacaatgacagaattgagcagttgcatgggacatatctatactaaaaaaattatttatggcttatctgacattcagatctaactggcttcccgtattttctttgacaacactgccaaggtgtgaattcccaggcagagagaggaagagtcctgcagggacttatgacagccagactttttcacgagggtgggtcaggggaccacagcccaaagagaaggcttcaaatgccccagatgactttatggcaggatatgctcccagcacctgaacaaaggtgagtctctattttctaagggagcaccctagagtctaatcttggaatctagggtctgcagttgtaacgcagctgggaaatatatatacatttttaattttttgattgttgtcattttgttgtgtttgtgtggctcacaagctgaagaggtctggttttcccatccaagatctttttgcagttgttttcttctcgaggtcttcctgcctcaccctctctggctcttgctgtctttctcctttacattgcgtgctcagggaatggttcaagagatccaatgccttctgacaggtgacaagacagagtgaacagtgcagtgggtttggggccataatccaggtggcagaaggaggagccacgaggcttagaaggaaacaaaacagagtctgctgccgaagaggccccaaaccaagggaggccctggaaggctcaaaactaggagaggcccagggaggccccaaaccaggggaagccctgggaggccaagggaggcccaaaaccaggggttgcagctctctttagatttttaaaataattattagggggcattattctcagatatggggctgcatggctgagtggaaccgacaccagcttcttttttttttttttttttttttttttgaggcagagtctcgctctgtggcccaggctggagtgcagtggcacgatctcggctcactgcaagctccgcctccctgggttctcaccattctcctgcctcagcctcccgactagctgggactacaggtgcccgccaccatgcccggctaatttttttgtattttttgtagagacggggtttcaccgtgttagccaggatggtcttgatctcctgatctcgtgatctgccctcctcggcctcccaaagtgctgggataacaggcatgagccaccgtgcccggcagacaccagcttctaaatgtgcctgaacaggcaggatccagctctgccacccactgctttgggagcctgggttttgtcatctgctcccaggaataatgggcttacctgccccggggttgctgtaaggactcaaagaagtgcctggcttggagacagctggctcagaacttatcatgcagaacccgaggctcagaggccaggtgactttcttgaggtcacacagctgatacaaagcagagctgggacggggacccaggtggggcatgcaccccaacccccttgctcactattctgttctcatagaagtcttgcttatttatttaattatttattttggccaggtgtggtggctcacgcctgcaatcccagcactttgggaggctgaaggaggcggatcacctgaggtcaggagtttgagaccagcctggccaacatggtgaaaccccatctctactaaaaatataaaaattatccaggtgtggtggtggacgtctataatcccagcttctcgggcatgagaatggcttgaacccgggaggcggaggttgcagtgagccgagatcgtaccactgtactccagcctgggtgacagagcgagactctgtctcaaaaaaaaagaaaaaagaaaaaaaagaaatcttgcttatttttaaccttttaggctctccatctgctctgaaatcttctgatcaaatctcaggaatcagcacacaattctgtgtttctgctgttacactggatctggctttgggaggggctagtttacggtactttgtcataggtacggagagatgcacagaggtgctgcgtgtaaaaggctgagcacagccccttacatacagaggagcccagaggctcttagctggagttgggagcacagtgtgtcactcttagcccaggtctgcttggcactgaccaatctgtaatgctcagctatcctcaccactatgtaaagcagtcagcaccaggaatggaaactacctagcagctctcagtaaatggtagcttaaacatgtccaagatccgaggtctcccctctttgtatctgctgccacttgtaaggggcaggggtggggctgctgatgcagtaccttctgcctcccaaaaaacacaggcacacataactcggagaagttcccagggcctcttccacctcctcggctctccagggccttccccagaaccggacagccccttattttgcaactcagaataaaagacttttatgaaataaatgagaaggaaaggggattgtttcttgggtatcccccagcaccctggagttgattttgagccccatttttctcctccaattctcttccaaacaatttctctaattcttttttttttttcagatggagcattgcttttgttgcccaaggtggagtgcaatggtgcaatctcggctcactgcaacttccgcctcccaggttcaagcgattctcctgcctcagactcccgagtagctgggattacaggcatgcatcaccatgcccagctaattttttgtatttttagtagaaacaggtttcactatgttgccaggctggtcttgaactcctgacctcaggtgatccgccgcctgggcctcccaaactgctgggattaaggcgtgagccaccgtgcccggccaatctctgtaattcttatctggaggaaaggggtttgatattctttggctgtgtccccacccaaatcttatcttgaattgtagctcccataattcccacatgttgtggaaaggacccagtgggagacaattgaatcatgggggcagttcctcccattccccccatactgtccttgtggtagtggatatgtctcatgagatctgacggtttgataaggggtttcccctttcacttggctctcattctctcttgcctgctgccatgtaagacgtgtctttcaccttccaccatgattgtgaggcctacccagccacatggaactatgagtccattaaacctctttttctttataaattacccagtatcgagtatgtctatcagcagcgtgaaaatcgaccaatacagggctccaggaaaacttctggggtaaaaagcagcaagttgggatggaaagagcacttttttacagggatctctcccatcagcagaaccccaatgctgttctgaagtgcagagccttctgggtgcaaagctctaggtactgggactccacccttttcaggatctttttccccgatgctgcacacagtcagaagtgcaaggcagggaccaggaacttattcaaggtgtgaccctctcccaacttaaacacagtttataagaccccttgttggcttctcagtgctcttcgaagtcttattcttcatctcctcaacactctgcagccacacttgttagaggaaaggggtcccgatccagacctccagagaaggttcttgaatctcacgcaagaaagaattcagggtgagtccatagagtgaagtgaaagcaagtttattagggaagtgaaggaataaaagaatggctactccatagacagagcagccccaaaggtcgctagttgcccatttttatggttatttcttgatgatatgctaaacaaggggtgggttattcatgcctccccttttgagaccatatagggtaacttcctgacattgccatggcatttgtaaactgtcatggtgctggtgggagtgtggtagtgaggatgaccagaggtcactcttgtcaccatcttggttttggtgggatttggccggcttctttagtgcagcttgttttttgttttttgtttttgtttttgttttgtttttttgagacggagtcgctctatcgcccaggctggagtgcagtggcgtgatctcggctcactgtaacctccacctcccaggttcaagtgattctcctgcctcagtctctcaagtagctgggatgataggcgtccaccaccacggccggctaatttttgtattttcactagagacagggtttcaccatactggcgaggctggtctagaactcctgacctcatgtgatctgcctgcctcgtcctcccaaagtgttgggattacaggtgtgagccatcacacccagcctgcagcctgttttgtcagcaaggtcttcatgacctgtatcttgtgccaacctcctatctcatcctgtgacttagaatgccttaacagtctgggaatgcagcccagtaggtctcagcctcattttacccagctcctgttcaacacggagttgttcgggttcccgcgcctctgacacactggtcccctttatgagccaccacatctcccattcttgctgcaggatctttgcacacgctgtccctgcctgtgtgctgaccgcagggaaactcccctgggacccctggtctagctcagttgccaaagctcacccttcctgggcccatgtgcccttctttttcaggccatttctctcagtttgaggttcaacaccttcctctctgagatggtttgctagtgtccacagctgctcccaactgggagctccctgagggcagggactgaagtcatgctgcatccccgggcccaggcctgtgggcagaatgcttcctggttcagagcccaagtcaggaatctcactgagcaattctgctctaaccccagtgaccattcacacggcaaaccacacaaccaccctgggcttccatttccttgactataaaatggagctatggctgggcttggtggctcacgcctgtaattccaacactttgggagtggataacctgaggtcaggagttcgagaccggactgactagcatggtgaaaccccatctctactaaaaatacaaaaattagcgggtcgtggttgtgggcacctgtaatcccagctacttgggaggctgaggcaggagaatcccttgaacgtgggaggtggaggttgcagtgagtcgatattgcgccactgcactacagcctaggcgacaagagcaaaactccgtctcaaaaaaataaataaataaaataaaatggagctgtaactgcacctctcccagagggctcttttaagggtgaaatgaatgagtgtgtgtcatttccttagcacggcatctgccattcattcaacaagcactcaggagctcctcctgtataccaggctctgcacctgcggaactacagctgaaaatgaaactgacaaagtcccctcctggtcgcggaaggcagcccacagatggacctagaagagaacgtcgaacgtcgggaaggacgttgtgttgggtggttcacagcacagacgctgcggccaaacgccaggtggtggagggcccttctcaaactgtctgacctctccgggcctcaattttctcagctataatatgggctgacaagagtaaacgacaagagcaaatgagttaatatgtgttgcccctgatgttacagtggataacgatgagctactattaggaaaagccagtcagggaactacagttgagaagaatggcagggtgtcgtgtatgcgatttcaggtggagaggtcacagcatgctcctttgggggtggagggtgataagggggaaggagggaaccatgtgggtatttgggaggaaatggtacagccacagagcagatcagggttgtcaggttcaaggctggaggctggtgctggggtaggaggtgaggctggagaaggtgctgatgtggcaaggcagggacatgcagtttgttccctgaggggtgggaagctgctggaggttgtgacaggtgcctggtgggatctgcccagcttagagagatttgccaatgttgctgtacaagggaggcatgtgggaagaaggacgggccccaggagaaccagcaagaggctctggggtccaggtgagaagtgatggtagcttcgagaggggcagcgatgatggagggaatgagaggcacaaattctgcatgcattttgaagaagtgaccaacagaaagtactggcaaatgggctgaagcctatggggcctggcacagtggctcatgcctgtaatcccagcattttgggaggttgaggtgggcagatcgcttgagcccaggagttcgagaccagcctggacaacatggcaagactccgtttctacaaaaaatacaaaacattgtctgggcatggaggcacgtgcctgtattaccagctatccaggaggctgaggtggaaggatcaccttgtcagaggcatgtgaaccagaactccatgttgaataggagctgggtaaaatgaggctgagacctactgggctgtgttcccagacggttaagggattctaagtcacgggatgaggtaggaggtcagcacaaaatacaggtcattaagacctgctgatgggccggtcgcggtggctcacacctgtaatcccagcacgttgggaggccgaggtgagcggatcacgaggtcaggagaccgagaccatcctggctaacacggtgaaaccccgtctctattaaaaatacaaaaaaattagccaagtgtggtggcacgagcctgtaatcccagctaatcgggaggctgaggcaggagaattgcttaatcccagaaggcgtaggttgcagtgagctgagatcgtgtcactgcactccagactgggtgatagagcaagactctgtctcaaaaaatgaaataaaataaaataaaataaaataaaaaaataaaataaagaccttgctgataaaacaggccacagtaaagaagtcggccaaaacccatcaaaaccaaaatggccacgagagtgacctccagtctttctcactgctacactcccacctgcgccatgacagtttacaaatgccgtggcaatgtcaggaagttatcctatatgatctaaaaaggggaagcatgaataacccaccccttgtttagcatatcatcaagaaataaccataaaaatgtgcaaccagcagccctcagggctgctctgtctacggagtagccattcttttattcctttactttcctaataaacttgctttcactttactctatggacttaccctgaattctttcttgcgtaagatctaagaaccctttctgggggtctggatcgggacccccttcctgtaacaacctgagcccaggaggtcgaggctgcagtgagccagccgctgtactccagcctgagtgacagagcaagaccctgtctaaaaaataaaaaataaaaaataaaataaaaaataaaagcctatagaaaagagaaatcaatggccacaccaagaatttggtctaactgggtataaatggagccatttacctaaacatgagtgaagtgcagggtgagtgtgccgtcggtggaacttattgaattattttattataaggattgtggcagaacagtaaagatgttggccacgctccttcaagtctcaagctcactggataggctaagtaaaaaaaaaaaaaaaaaaatcaagcaagaataagcaaaagtctgtcccacatacagaaggaagccactttctgtccacacctgaggaaaactgagctttcttggcaggcatcgagaactgatggctgtccgagaccagcatccccgtgacttctgacttttcattttaaaacttattttcacatttgctcaagttgtgcctattctagggcactttgaaaagcggctctttctccaaccccatcctcgcctcattccaaggacagacttgaaatggggtgggtcacctggcgtctgcaattttcctataaatgtccccctccctggatagagctagtcaaaagtgggatgtgtttagaagatatagagggatgcggaggtgtgtgtaaagctatcagaatattttactgtatcctctccatgcccaggtgggtggaactggtttcattggtaaacgcttcctaaaccagagaacaatgagaggcaattgatcatcaaaaaaacccaacaacaacaaaaacaaaacacacacacacactgacaagctcctcttcccctcaaactgacaacaacagaaaaaaaaaagaaaagcttttaaaaagaaagagagatctttgtgaatgtacattgtaagttgaggcctggagagagagcaggattggagaggggaggtctctgcctcaagggggcttcacttatttatgtctctagttaataaaatagattatactttcatgagattcccccaaattgtaaacatttctcttaaagccattaatagtgataatatatgatagacatgagtgactgatacttcatagatgccatagcatcatcaccatcacctttgctgaccatttcctgcctgccaaggctctacacccctggtctgtgttggcctcaaggcccccagcagccctgcaaggaaggtgcttttatgttcaccagcttaggcacgcagcagggcgagaatcttgcctcccctgctgtgtgcattccccccaaaatccactctaagtgccccagcctgtttggtggcacagaaagcctcttcccagaaccttcacgtcacgtcttcaagttcaaaactcatctcccatcatttataaccatttggcaaatttcatttaaaaagaaaatccatttaatgaaatatttccgtttaaataccagcacattagatttacaaaaatgtgcccatcttgaatacatttaagcaaaaatcaatcgaggttaatagcatattgctagagcatcgtggcgacagaaagtcaaataattccttttgtaattgaatagtaccactggagtgtgaggaggaatcaacaacggcgtttctaccatagcttttcaaatggtgtgtgaaattcaaccattgggctgtgatagccacagaagattcaaatttgactaattaggtgaattgtgcaattttccattttttaataggaaaggaggatggcgaggcaattttgagagggttgggctgagagcggtgggggggaatatcctgtgaagataacaaagtccttaacaacaatgtaatttaagaaaaaggatttaattgggacctattaccagacaagcccgctggtttgaaggacaagattaaaaatatttcattattgcacacgtgactttgggaatagatgctcaaagaatttatcattttcctgaatcacttactgcccagcactttctccaaaggaaaggggatttgtaataaagtatcaggccaaagaaactgcagttctttctggccaccccttttttaaaaaaaatttttatttttatttatttatttattatttttgaggctgtgtcttgctctatcacccaggctggagtgcagtggcatgatcttggctcactgcaacctccacctcccaggttcaagcgattctcctgcctcagcctctcgattagctgggattacaggcacgcaccaccatgcctggctaatttttatattttttagtagagatggggtttcaccatgttgaccaggctggtctcgaactcctgacctcaagtgatctgcccgccttggcctcccaaagtgctgggattataggcgtgagccaccgcgcccggcctctggccactcttatttaattattcccccatggtaatggatatttgtccttactgctgaacaccaatctacaccaatctcccctcttccttatcagcaccttgagcgctcttgggtaaactggtaggcttagccctgtagtttgagtccaaacgtgtcatctggcctgcctcagggcagactctgattgtctaaccagcctgcatgttccctcgactcagaggctggctcagtgaataggcgtatctcaaatccacatcaaaaagacacgaaaaacaaataatgtctccttgctcccttaactgagagggtctagaagcaacgtcaccttgatatcaacaagtacacctaggccagcgcagtggctcacgcctgtaatcccagcactttgggaggccaaggcacgcggattgcttgagctcaagagttcaagatcagcctgggcaacatggcaaaaccctgtcactaccaaaatataaaaaattagccgggcatggcggtgcccacctgtggtcccagccacttgggaggctgaggcagaagaatctcttgagcccgggaaacagaggttgcagtgagccgagatggcacctctgcactccagcctgggcgacagggtgagacccaatctcacaacaaaacaagtacatctagagcccagaacttacaataaaaggaaccggggctccttggagaaatggcagatcccaggactggggcagaaaatatacaacataagcctgaagcatcttctagttcagaaagtaagaaatgctaaagcaaacaaacaaataaccccaaatcatggggtcatggccaaaggccacaggagccacccgaaagagctccctgtggtcaaagcgagagcaatttgagcaggaaagtaaaggagtgttagcttataaataaaaataaatcaataaatatttattcagagttcaaaataaatatatatgctccatactgatataagtaaattattaaataaatagggagaagtagacaaatctctcatgcagaaatgttccaaataatgtatggagatgcttcactctcaatggggaagcatagctcccactcctgaagtgtggcctgcacatagggacttccttccaaagagtccagggggaaagagtaacttcacagtggagaaacctgacaagcctcaccccagccagctgatcaaggttaatatcaacagcgataagttgtgttcagagtatatatgcttacgtaatgggatgagaagggcactctacctctgggatcttcctcccagatacctataaccccatctattcatgagaaaacatcagacaaatcctaactgagggacagtctgcaaatacctgacaggtcctcctctgaacggtgcaggtcactagagacaaggagaatccgagcaacagttacagccaagtggagcctgaggtgatacgatgactagatgtcatgcaggatcctgggcagaaaaaggacattaggtaaaagctaaggaaatttgaataaatgtggactttagttgataatattgtatcaatgtcagctcatgacaaatgtaccatggtcacctaagatgttaatggaagaaactgggtgtgagttcatgggaactctgtactttctttggaattttcctgtaaatctaaaattgttctaaaattttaaaaatattattttaaaaacccgatatgaacagctatttacggggacttctgggaaaataaagccccttgcatgggatcatgtgtagggcataagaatatgaaatttgcaagtaactgtgacattttgccaccaaaaggggaagacttgatctgctagcagttcctaggtatagtttatgattaagctcacactgaagagtgaagaaagaggccaggcactgtggctcacgcctgtaatcccagcactttgggaggccgaggcaagtgggtcacctgaggtcaggagttcgagaccagcctggccaacatggctatgccccgtctctactaaaaatgcaaaaattagtcgagtgtggtggtacatgcttgtaattccagctactcgggaagctgaggcaggagaatcgctggaacccaggaggcagagattgcaatgagccgagattctgccattgcactccagcctgggtgacagagcgagactccatctcaaaaaaaaagaaaataaaagaaaaaagggagaaagaatagatatagagaaataaagttcttcatgatatgaccatgagtggctggatccagccttgcctgagattaatttaatccttgacttttctgattctgaacaagtaattcctttattatttgagtgggttttctgtcatttgcaacataatgattaattatgcgttgttgggaatcattctcatctcctctgaaccgctcagtaatcccaaattctgaactcacacactctgtgatgtttgaggtgcaaattaatccctgaaaagcctgagctgtgcatgctttggggatacttctctgccgtctccaagtcagagtcaggtgcatgggtagagggctacagggacctctgggctaatggggtttttggagttggacttcatttcccaccaaataaatctccctcccctgttagaggataatttctgggacatcttctgactaagttgaggcttgagccccttgcttctcagttttctcagtctgtggttatttgttgttttatttagggatggctggggacgtgctgtgattatggttcgggttttcatgtctgctgtagatttcactgggagatcacccccttcatgtcccaccccactggtaatagttatgttcctacttgttacttttaaaaagccttttatggaaggccatttgtgtaaacaaacaatcaaacatttcttttttttttttttttgagatggagtctggctctgtcgcccaggctggagtgcagtggcacaatcgcagctcactacaacctctgcctcccagggttcaagcgagtcttctgcctcagcctcctgagtagctggcatgacaggcacccgccaccgcacccggctaatttttttgtatttttactagagacggggtttcaccatattgtccaggctggtctccatctcctgacctcatgatctgcccgccttggcctcccaaagtgccgggattacaggcgtgagccattgcacccggccacaatcaaacatttctaaattgcccctgcttccacagggcaaggactatctcttaatcatctttatttttctagtacacaagtcctcggttcagcacagcaagtcagtaaatgagcgatcctgtaactccccgcccacaggggaggagcctgagatgcagacaggccggatgcgtgttgtgggccggatgccacccaagtctgtttggctccagagcttcctgcttctctgtccccacctccccacctgccacagccttcctgtgagctcttagaggaagggacagtcttcttgccagagtggctaatgacacctcagatccatgctaaatctttgagcacaagctcttaggacgagtggctaaaggccattgaaacgccagccccactgatacccaggataggaggcacagtgctttgaacagagccctctaatctcctccttagcttcaaaaggaatgaagggtttctcctaaggctgtcagtcaaaccattacagcctttgtgaaaggtgtgaccttggactgcagtcacacacctgccctttcagcagctctttcatgttctttaattcaactgcacagggttccaaaggccaccttcattcaccttcatcccccccaactcctgatgcataaaatcctgcactctgcagtttttctctccctttcatttgttctaaaggtcaccttagctcctactttgaaggaattcattcattcattcaacaaatttttgttaagggcctactctgcgtcaggcactgttccagcactgggaacatggttacaaggcaggcagcgtctgcgtggagccaggggttgccctgttcatgacccagctctgcaaaatgtctcgctaatatgcaaagacagtgggtctatttcaattcaaatacttatcagaaaaaaatttccccctgttttgtagttggatgggctacaaaaggtttaggagagagccttcatttttggggctaggccacataaacccaggcaggtataggcagttgtaggacatcatgcaatgctaggataagatgataaggttgacaagaaaagcaagcatctcctatggcaaaagatagccttaaaaattccttaaatagtcttagagtccttggtttgagcaagcaatctcgtgtggtaatatatgtatacaaatgtagaatgttgtcttagttcattttgtgctgctgtaaaaaaatatctgacattgagtaatttatagagaaaagacatttatttttcatcgttttgaaggctgagaagtccaggatcaaggtgcaaacatctggcaagtgtcttcttgctgcaccatcccggggggaaggtggaaggcagaagggcagagagggtgagagagagaaaaggagactaaacttgcccctttcttccttccttccttctttccttccttccttccttgcttccttccttccttccttccttccttccttccttccttccttccttccttccttcctttccctttctctctctctctctttcttcctttctttctttcattcttttactttaagttctgggatacatgagctgaacatgcaggtttgttacataggaatacatgtgccatggtggtttgctgcacctattaacccatcatctaggtttttttttgttgttgttgtttgtttgtttgtttgagacggagtctcgctctgtcacccagactggagtgcaatggcgcgatcttggctcactgcagtctctgcctctcaagttcaagagattctcctgcctcagcctcctgagattacaggcatgtgccaccaagcctggctaatttttttgtatttttagtagagacggggtttcgccgtgttggccaggctggtctcgaactcctgacctcaggtgatctgtctgccttggcctcccaaagtgctggggttacaggcatgagccaccgtgcccagcctcatctaggttttaagcccagcacgcattaggtatttgtcctaatgctttccctcctctttcccccaacccccgacaggccctagagtgtgatgttcccctcgccatgtccatgtgttctaatttgaactcgcccttttctaatgaacttactccctggataatagctcttaatccattactaagagcagagcccttgtgaactaaagaggtgattaacctcttaaagtttccacctcttacaatgccaatcaaatttcaacctaagtcttagaaggaacaaatcttcaaatcatagcaaaagtatatagacataggtcatgtattgcaaagaataaatgttacagaatttattttacagtgttttcttttatacagaaaggtgggtagagagtgttacagttacggaactgcctttaccaagctccctgccgcgcccccttagattctgaatttggcagtctgaggagtcctgttaaaccaagttggatctgatcgctgccccagtggctcccttcacatggggtaagaccaaggcccttgaagtatgcccagggccctatgatttgtccccatctcccactgaccccatctcctgccactgccctctgcccacctgtgtagctacactggcctcctggtgtttctggagcccatccgccctgctctctctctcagatgcacttgctcttccctctgcctgcacatcccaggcagacacatcctctcctcttctcctctgcaggtctccttcaaattgctaccaaaacaccaggggtttcccccaactcccagcatcccttagccccctcccctgccttatttttatcttaccactatcagacataccctatgtttgatttttttatttttaaaattttcttagagtcttgctctgtcacccatggtggagtgcagtgttgtgatcatagctcactgcaactcaaactcctgggctccagccatcctcccgccgcagcatccctagtagctgggactgcaggcatgcaccaccacacccagctaattcttcttgaacttcttttttagaaacagggtcccattatactgtccaggccggtctcaaactcctggcctcaagtgatcctcgcaccttggcctcccaaagtgctgggattacaagtgtgagctaaaatcccagtagtgtacagtgcccagcctagtttttgttttttttttggtaatccttgtttgttgttgttgttgttgttgttttaaattcctaactccccaaatttgttactgttttatttttaaatgttgtttaactgtaaactccatgaggacaagttttcttgccttttttcttccctgatgtgcgctcggctcctagaaatgggcttggcacttggtaggagcttaatcaatctttgccagatgaaggaatgaatgaatgaatggatggatggatgaatgaatgaatgaatggatgaatgaatgaatgaatggatgaatgaatgaatgaatgaatggagtgagtagcgcctgtgcgcaacagcttatggatcatgtcagtcgggattcctggatgcggtacttcaatcaacgctttacaaaaatgctgcaggggagagtgtcactctcttattagaacagagaataaagggatttgtgttcttatggaatgattaattattctggtttattttttctttaccccaccttgggaacaagcaccccattaccacaaggtgagaaatctgtatattaaccatgtttcactctgagctcagagtccccttcttcaaccatggtctcatctgtaaaacttgtgtgtttgggaaggaatgagaaccccaccggagaatgttccccaaatcagagtagcgacatgtgtcttagccaaggagttcttccaggttcttatccgtggggtgtacactgtggcctgctcatgctcagtattttcataccctagatgtaagttgtaagttttcgtgttttattatttcacatttaatttttttctccaaaacaaggctctgccagatgtaacctggctgcttatataataccattccaatttgttaaatatcaatgataatagatattcttgcagtatctaagaacagcaaagacagcttgtggagagtattataagcggtgccatgaaaggtacgggataaatgagaagtgtgcctgggtggctattcatgagtacctgcagaggggtgctgtgcatggggcagttacatcagagcccacctctgccccaaactggtagtctttgggaagctggtgtcggcctctgggtaagtcttagtttcaccacctggaaaatggggactacattagcactttcttcaaagggccattgtctgcatggaatgaaatcccagatggacggcggctctcccagggctctgagcacttgttcagtcatcagccgccagctcctgctgttattcctattagtttagcctctgggaagatgtgagctgcagagactgtaatgcccaagcacggacattgctgttgcctcagagatgtcactctggcttggctcttgtccccaacgggctctgaggaggacttgctgctgggcagggccccaagtgtgtgctgggctttcccaggtcagcctccctccagcaggcagctggcataggtggcccagggagaaggtgttcctccctcaagcccttcaggaaggccgggctgtccagcagatggggtagagacaggctgggagcacagggggcttcccaaggtcccccctgggccatttctgagttaagtcaggcccccacagggaatcccagcctctcctgcaggtttcacaggagagtccagaaatgtccaggactctccctgcctcgaggctctttctggtgatggtggaggggatttagttattttaataatatctggagtttattctgaatgatcagttatgcataaccattacgtagcattatttatgaaattgggaggcatgcctcatggttacggaaactctaatgaggggggccctgatttatgccataaacaggacattatccagtattctcttgacctcacctctctggccacaccacacccccaaggttgatttacatttgaaagatgccctgtgcctcttgagacatttctctctctctctttttttttttttttttcttttggtgcaatggcttgatctcagatcactgcaaccttcacctccggaattcaagtgatcctcctgcctcagcctcccaagtagctgggattcccagctaatttctgtatttttagtagagacgggatttcaccatgttggtcatgctggtctcaaactcctgacttcgtgatcttcccacctcagcctcccaaagtgctgagattacagaccatcacgccccgtcctgctggtcattttcagtgcctgcaaagagaagcgatttttttttcccttagacgtgaacacagaattgtttcctcctggtagctgtgattccttggttattctttttacagttggaaaaaaaaaaaccatcctctatgaagcctggtgtcaccttttcaggaaagcctgaggacgaatgggcaggtacccaaaacatttttccctattgtgatcacaattagatagtcataatactgatcgttattattttgtggaatgtttactctgcaggcactgggctaagctctttgtatactttctattatttagtccatgtaacaattctgagaaaggaaggcttagaggggcaaaaggcttatttatagtcttctgatcaggaagttgtcccattccacagagagcacagaactgtctactctttcttctccctcccatgagtggccaccgggaggggaaaatgtgctgtgggtgcctcaaggaaaagagaaggtacttgaatgtcaacttctcctgggtgacttattgaccacggacagatatttgttgaatgatggaaaaggaaaatggagccaccatcttcccttgggacattcccttgtgacacagtgtagaccaaagcattggtgggaaggcaagaaggaagaagatatgcagagggaagcagaggcaagaccagatcctcctgatttctggtttgatggcaccatcaaggcagggcagcatctctgcccttaccaatgcagaaatcagctaacagcaacaacagcaataattggcatttattgaggattcattctgttcctgactgcccattagttatacagcaaaattgcagtcttttagttttaaataagacaatagctcagaagtaaatggtaactgtattagtctgttctcacactgctataaagatagtaccagagactgggtaatttatacaggaaagaggtttaattgactcacagttccacatggctggggaggtctcaggaaacttacaatcatggaggaaggagaagaggaagcaaggcacatcttcccatggcagcaggagagagagagagagcagggaaaactgccacttataaaaatatcagatttcgtgagaagtcacgccctatcacgagaacagcatgaggaaactgcccccatgatccagtcacctcccatcatgtcccgccctagtggggattacaattcgagatgagatctgggtggggacacagagccaaaccatatcagtgagtaaatgtaagtaggtgcaggagaagaaacactgccttaccctccactggaagaggctgtcagatgttaggacattggagtgagtgaactgttaagagctttatgggctggagtaagcagcctccagttcaaatcctggttcctctactcactagttatgaggccctgggtaaatcacaccaccatttatccattgaaccattcattcgttcattcgttctatctcttcaacaaacgttagttgaatacctactataccctaggtaggcatttgagaactgaagccaacagaactccctgcatctgtgttagacaacacagaagaccaagcaaaactaacagacttgttcgctgcaggagatatgtgcttctgggagataagactgtcaactagctaaattgcttcctcaccaagacctgctgcaagaccctcatgtaggtgtgcccgccatttcaattccaaaccatttttcctcaggcgagacctgccttaacgccaccgggctcagtccctaaaactatgatcaataggttttcttgaggatcttgggtgcagaagtcttcaacacgcttttccagctactcagaatacaaaggtgaacggaacagaccaatcgctgtccttacagaacattctagtgcaggcagggaaactaaacaaatgaatcagcacatttgcacaatatttcagatggtggaagagccagggggaaaagcagaacaggttaaggagctagggagagggagacagatactgtttttgtttgtttgtttgtttttgttttgttttttgagatggagtctcgctctgtcccccaggctgaagtgcagtggtgcaatctcggctcattgcaacctctacctccggggttcaagtgattctcctgcctcagcctcccgagtagctgggattataggcgcccacaccatgcccggctaatttttgtatttttagtagagatggggtttcaccacattggccagcctggtcttgaactcctgacctcaggtgatctgcccaccttggcctcccaaggtgctggggttacaggtgtgaaccaccacgcctggccgagatactattttatagagggtcaccagagaaggcttatctgataagagaacatttgggaagacatctgatggaaaggaaagagttagccaaggagttaactggaggagaaatactccaggctgagccgacagcatgtgcaaagggcctagggtgggcttgtgctcagcatacagagagacagagcaaagaggtctgtgtgactgagggagattaagcaagaaggagagaaagagaaaaatagggcagggaggtgtgtgggcatagcgggccaggttgacaagagtcttgcatggcatgtggctttactctgaataagaagggagccctcggagggcttggagcagagggagaattgttctgattaactttttaaaagaatccctctggatctcagtctcctgacctaggggctggcaaacatcctggaaaaggcctgtgagtggcaggtcaataaccctccagtgtctatgtcctgctccctggaacctgtacatacattttgttatgtgaccaaagagactgcagatgtgattaaattaagaatcttgagatgaggagattaactcggattatccaggtgggcccgatgtcatctcaaggatccttttaaaagaaagagggaggcaggaggagcagtgttagagtggtgcaatgtgagaaagactctatcaaccactgctggcttcaaagatgaaggaagaggccacaagccaaggactgcaggcaatgtctagaagctgggaaaggcaaatacgtggattcttcctcagggcctccagaaaggagcacagccctgctcacactgggaatttaacctgggaagacccacgtccatcctccgtcctctaggactgtacgataataggtttgttgctttaagccaccaagtgtgtggtgatttgttacagcagcaacaggaaagtactagagtcagatagtaaatattttcagctttgtgagtcacgcagtgttttccacaacttgcaactctgccattgtgggaaatggatgagtgtggctggatttggcccacaggccgtatttgttgacccttgtcctaacatgttaaataagaactagaaatagtagtaactgcagaatgctgtttgtgagcattaaatgaaataatgcatacaggggccaagcgcgctgattcacgcctgcaatcccagcactttgggaggccaaggcggacagatcacttgagaccaggagttcgagaccagcctggccaacatggtgaaacctcaactctactaaaaatacaaaaattagccaggcatggtggcagtggtctgtaatccaagctactggggagactaaggcacaagaattgattgaacctgggaggcggaggttgcagtgaaccgagatcatgccactgcactccggcccaggtgacagaggaagagtttgtctcaaaaaaaaagaaaaaaaaaaagaaagaaaaaaaagaaagaatgtataaggagctgttcgagcctgagaaatagcacgcacctgatcaatgtgcattatgatgatgatgatgttattattattaccatcaatattattgcagtggttataggaggaatagtcttgattttttcccagtagtcttcccatcagaacaccataacagtaggcgagaatgatccatttgtcaggtatttctgatgagccagcttatagacaccacatcagggagaagagcagctagggaggaagaataaaaagagaacaattttctttactgaaaatgacaacctagaagagaaatggtgaaaaacaaatatctccaagtcgcaggatcatcctggctttgaatggcacagggctgtcctgttaccatttccccattccagcattgacatattttattgttaattgctttttcaaacctcatcaatgatcttttgcactttccgcaaagaaatgttgaaagcttttaatgaagaaattaattatgtatagtcttgaatgcaaattagactaattaattgtagcattgataccctctcctagcacaaaatatgagaactggcgttatacatatttataaggcacagtacattttgacagatgcctgcagactgtgatgaaaaggtggtcaaggtgtctgaaagggatgccttttctctgacagataaataaggttgcatttcgtgagaagtttagtttagttgtcaacaatagtgactttggaatgttgagatgtgaaaacttttgtcataaaatggattttaccccaaatggaaaaacttctgtagagtcgaggtgattgggtgtggaattgaacgtatcctgggaaaatgcattggggtgttcttggttcttaccaggcaattagtaaaggaggtcacatgtctgcagcagccatgtctatcagggctggatgaaggagtagttggggcacacttctttttaattgtgttttattccattcaagagaatggagagtgggcaccttgtaaatttcacttagtccccaggaaccaatgttctgccccgaagaaaagaactcactgggggtaaaaatggccacaatgttaacagcttctcccatccagaggtagagtttgtcgaccctttggatcttggcttggtcatgtgacttgctttgggtggccaatgggacttcagcaaacctaatacaagcaaaggattgaaaaatgcttctgcattaaagtttgccttctcctgctgctgctggaaacccttctaccaccatgagagcaagcacatggagataggcctggctatcccagagatggccccaggcaggtgagtgaggcaattctagaccagccagcccctgccaagccagtctacacaagaagattatccaagcaaccaatcaaattatgagaaatttaaaaacgcatgtttgctatttcatgccactgagtttgggataatgtgttaggcagcaaaggctaactgacaccaccaaaatttcagagccctttcttcctgtatttgagggaggtagatattaagaccttatttgtaagtgacaggtactgtgtcctagaaggtctgctatggataaagaccagtcatgaaaaagacagacaataaacaggtaaatgcatcaatgcctcgttacaaatggaaggaattgagttggacaaagagggagggaagacacttgctctgagcaagggcagcaggcactactgtgaccttccaatggctaccttctacctccatcttcttcctgccttgtcaaacctgtagaggttgtgacagaggctgaaggtacaggcactctctttcccatcttccttggcagctgggtatgtccacgtgacccaattctgtccaggggacccagggaaatctgctgggatatccttggaaaggtttcctccctggtaaaaagagacacatctccaatggcgtggctatgtcctgccgtgctaggcagaatgccaaatgtcccttctgagatttcctgtcctaatcatcagggctgtggacatgctgagctatcatactcaggatggttttcattacatggcaagagggatttcgtgatgcaattaaggctactcatcgggcccatgctaatcacatgaaccccttaaaaacagagcgctttggctgggcatggtggctcatgcctgtaatcccagcactttgggaggccaaggcgggtggatcacgaggtcaggagattgagaccatcctggctaacatggtgaaaccccgtctctactaaaaatacaaaaaattagctgggtgcggtggtgggcacctgtagtcccagtgacttgggaggctgaggcaggagaatggcatgaacccaggaggtggaggttgcagtgagccgagatcgcgccactgcactccagcctgggcgacagagtgagactccgtctcaaaaacaaacaaacagacaaaaactagagtgctttctccagttggtagcaggaaaattcagatattcaaagtatgagaagggttcaaaacaagagagctctttagttgctggccttgaggattggtggctggtgggggtggagggggtggggctcatgaaaaaggcctgagagtggcttctgggagctgagcgtggtgtggctgacagtcagcaaaatgagggtctcagtccctaatttattgtggggggtgggggctgtctattttctttaaggacataatctcaccaggcaacaagtagctacaagaggggctgggcagttgtctgcaagagcagcagagaaacaggatcacagccttcgcacagccatggggagaaaaacaaacaggaggtggagactgagcgggaaaaagagttgggattctacatccctgtcccagtcccttccccagccctggctacaccctacccactcatttctcccgggtgtggccccctcattgggatctgttgcttaagctagcccagtttgctgtaggcttcttgagaaaaaaggtgttctgtccaatacaacatccttcaggatgaagaggcaaagctatggatggttcacttcatcacagcctttagcttggcccaacttccacaaatctgtatctttcaattccaaccagtttcacttatgggcgagcaaatgcccttcaccagggctacctgaagtgtggtttgcagttccagtgactgcccatacactgctggctgttggtttttaaggaaatggagaataagtgctgtgaagcttttacagaaattggacatttataccacatccaagtgcgcaatctcttgctgatgacaatatatgctcttagagtacggacagttttggtgtggtcaggcttgtgtggtgggtctcatgtggcgagtcagtaaggtacatgctatgtacttgccatgcacagtaggaccatttattggtctgtgatgtattgacaataaaaataaattaattaatttaaaaaacccgtgattcttccccactggtagcttgtgaagcaccaacccagacttaggcacgtcaagattttcctggcaaatgtcatagtttggggcaatcttttgagttggagccatagcttttcttcctggaataaatgcaggtgtgctcgccgattccttcatttcctgttggggactcctcagactcctgtcttccttaggtgatctccttccttcacccccaggccaggtggagaaggctcaagtgcagccaattctgcctagctttccttggaagatgataggttcagagtgttaggagtaggaggttttccagcccagtgcttcccagtggtgttcagggcccccaggtgcttctcgaaaaggtcccattaacttaagagacgctgcttagtgtctctctcctggaaagtggggatgggactgaagataaaaactggaggtggaaaggacccatgaaattacaaaaatgctccatttttgtagcagaggaaactgaaatcagagaggtcaatcaaaggacttgcatgaggtcacatttcgataaggacccagattcttagagagagcctctggcactaactcaccttgttagggtactgctatggctgctggaacaaagatcaagataacagtggctaagaccagatggaagtctgtttcccttttttaaaattatttatttatttatttatttgtttgtttgtttgtttatttatttttgagatggagttttgctcttgttgcccaggctggagtgcaatggtgtgatcttggctcaccgcaacctccacctcctgggttcaagcgattctcttgcttcagcctcccgagtagctgggattacaggcatgtaccaccatgcctggctaattttgtatttttagtagagatggcatttctccatgttggtcaggctggtcttgaactcctgacctcaagtgatccacccacctcggcctccccaagtgctgggattacaggcgtgagccactgcgcccggtcctttttcccttttatatctcagtgtaagtaggctgatggcatcaggaactcaagccccttctcttttttctgttctgtcttcagcaggaggaatctgttttgtagtctaaaatggctgcttcagctcctgccactgtgtctgcattccagccagaggaatgaagggaaaagacaaggggaggacatgctcttttatttctgaaggtgtgttagggatttattcctacttaataaaaatccacagacccttaggagtaaacacaataggtttgtattggacttttgttcaagcatcttgggtagttgcctgggcagctcttccaacctgggctgggctcactcacactctgggaatcagctggctgtcagtgcacccaggctgtcctcaactgggacaactagaccaagttgactgggccccccaggactctcaccctccaacaggctagcccgggtgtattctcactgccacgatggcagaggcatgacagcacaaacccagcgcacaagcccacttctggcctctgcattcatcttatctgctaacgtcccagggccaaagcgagtcacctgactgagctcagaatccagggtttggctagcccaggatagcttggatagggaaggagctgccttgtatggggcaaaaaagcaaggatacagagaggagggaagaactggatacagtttcacaatctcttactctcagtactttggtcatatccgatgaggtaggacctagtcactgggccacactgagctgcaagggactctgggaagtgcagtctcaccagaggcaggctctcagctgtaccattgactaggataaaggaggagagggcggatcgaaggaaaagaaaggagaactcttggccacacttgacctgtaatcttgggcaagccccaggctgctccactgactctccccatcttttcagaactttccctgatccaccagtcaaaatgaattcccacctccttttcctctgaactccccaggaagtacagttggctccctcctaaagtctgtgttactttccaccttgagttttttgtttttcgagactgagtcttgctctgtcattcaggctggagtgtagtggtgcgatctcagttcactgcaacctccacctcccggattcaagcaattctcctgcctcagcctcctgagtagctgcggttacaggcatgcactaccacgcctggctaatttttgtatttttagtagagacggtgtttcaccatgttggtcaggctggtctcgaactcctgacctcatgattcacccacctcggcctcccaaagtgctgggattacaggtgtgtgcaatggcacagtcttggctcactgcaacctctgcctcctgggttcaagagattctcctgcctcagcctcccgagtagctgggattacaggcatgtaccaccacacctagctaatttttgtatttttagtagagatggggtttcaccatgttggtcaggctggtcttgaactcctgacctcaggtgatccacctacctcggtctcccaaagtgctggggttacaggcacgagccactgtgcccggcctccaccttgagttaagcctttctgtttctaggtttctctcccctggtgactataaactccatcaattgtccatttgtggagccccacctgttagccaggcctggagacccagagagggaagatacaatcccagcagaggttgaaaagaggtggcctgcacaccagaacagacaggcagactgctgtgcctggaccatgtcacacagtgtatacaaatttagtagctgccaacatttaaaaattgggaatcacccttccagaaacagatttctggcttcactggaaaaatgagcagatctagcaatactgggcccatatttccataattagaatgcttgtttaatattatgtatcacataatttacatatgtgatctataaacacgtaagtgtatttgcattttagctgttaccattccctaaaatgtgggctccacaagatgctgagatattgctttgctcactgctctattctggtgcctcacacagtgcctggcatcaggtcagaagttacttgtgagtaatgaattagatgaagcaacaatgggttggagcagcagatcgctgtcccctccaaatgagtcccactcagtaatctgtattctctgcctggatcttggagttcaatacactctgaaaggagagggcactgtcaacaatgagtgtgcaatgtcacaggtaccatgagaaaggtgagccccaggaaaacccagggaggagccaggaaggcttcctgaatgcatttgccagactgggaagtgaacggtaatttttaggagagggaagagcatgcctggaagcccagaggcccatgctattgtttcagtttggctaaatgtacatctctggggcagaggagacactgggacaagtggacaaggagcagatggggaagatccctgtctactggtctaagaagcttgatctctatcctgggggatgaaggttttgagccaaggagtaacaggatcagatgtgagttataaaaagaactcccgcctgtagtgtgaggaatgggtgggcatgcacgggggctggccggggctccttttagggtagggtcctatggggggcacataataatgaaaatcaatgaagggacccatgtaagatgacaaaagtcaactcacacttggctgcactgtctgggaaacagtagggagtagtggggactgtggcgaactggtgcaggctcacctgtctacagaagggcttcccaatcttagcactattgacatggggggctggaaattctctgttccatgaggctgactgtgcaatgtacaccatctagcaacatccctggcctctgttcgctggatgccagttatgaccactgaacatgtccccagatgttgccagatgtctcctggagggtgaaatcttcccctggctaagagagactggtctgcagggagccaccactcagcaccagctaatgctgccctgtgggaatggagacccactgctcctgagtcttcccattcttcaatcttttcatatttactgttggcaaataatgttttttgggttgtttttgagaagtggcagccaaaaccatgtgtgacagacaaaagcacacctgggcctcagcttgcaacctttaagtcagcagtctctcacaatcaccaaggtgagaaatggtctttgggatttacggtggatttattcttacatttcccaaagggcctgctttctgggaccttccactcgatagtaacttgttccagtatttatcaagtgagcaaacaaagaagttggcagtttattatactaacgctctgggcccctccctctctgccccctcatttgtatttgatatgcaaaccgcaggtctcggagatcacccaagcctatttctgtccccttccccacactccccacttctgtaagagtttaagagttcaaaaaatcatctgaaatcacaaacccaatcccacgtgactgccagcctatgccagcacctacatcggaaaccagcctttccagaaccagacagaggagccacccacgagcatgtcccctccccctcttggccatgtgtgggaaaatgccatctgctttgtggtggtcaggacgatgagtttatgctgaaaatgttccgctctggataaaagtaaattttaaaaaaaccttgttccttagaattaacatcaatatttattttttgcaccgccgacatttcggacttcccccagcctgccttccccatgtctggtaggaaagactcctggtagggaccacgtgcaatggttctcatttgcacactggctccactaccgtctcctcacagttgggtgtttttgacaggctctgcctcttgtttagagatttagtgaaattttgcagattcaaggattctgatctccacagtccatttctggtgggcgtcccacatctcctggctgggaatgcgagttgacggagggctccaggatctgtaggctattccagagccagggcacacaggaggcaaggcctacaacagaaataatgatacagatgggagctccctttatctggggcttcctcagagcctgcacagggctgacccttggtggacaccatctcgtttcaccctgcctgcaccctgagaggcaggtggcatcttctcccatcctctgttccagagcccatcccggctggagcctgcctgtcttcacacctcactcctgccaccctttaccttgacctctctgttcccaccatcctggactgccttcagtggttccctggcagggagtggcagttttttcttcaaaaggacaggtagcaaatgttttaggctttgtggtttgctaggaagccacctggttttagcatgagggttctgtgtccccagaaaccccatctgtgctaggcaaaccagggcagttggtgaccctactttgctgccagctgctttctttttttttttttttttttttttgagacagagtctcgctctgtcgcccaggctggagtgtagtggcgcaatcttggctcactgcaagcgccgcctcccgggttcacgccattctcctgcctcagcttcccaagtagctgggactacgggcacccgccaccgcgcccggctaactttttgtattttaagtagagacgggttttcaccgtgttggccaggatggtctcgatctcctgacctcgtgatccgcccacctcggcctcccaaagtgctgggattacaggcgtgagccaccgcgcccggccagccagctgctttctatagcgactactcaactctgtcattgtagcactatagcagccatagaaaatatgtaaataagtgggcatggctgtgtgccaataaaactttattttatttatttattttttggcacggagtctcgctctgtcacccaggctggagtgcaatggcacgatcttggctcactgcaacctccgcctcccgggttcaagtgattctcctgcctcagcctccggagtaactgggactacaggcacccgccaccacgcccggctaattttttgtatttttagtagagatggggtttcaccaggttagccaggatggtctcgatctcctgaccttgtaatccgccagcctcggccttccaaagtgctgggattacaggcgtgagccaccgcgcccggccaataaaactttatttataaaaactaagcggtcagccagatttggctgctagagctagaggtagtttgctggcttctgcttcaggcgccaagctcacttcctcctccgggccttggcttttccctgggacattcctttacaacatccactctgcgctcccggttgcttccgcagaggccgccgctgactgcagggctcccgcacccggccgcttgctgaatgttggctgctcaggacccacagccacttctttctctggagagttggtctcaaccaaagacgtctgcaccgcctccccaacgaacacagctccagttccgcaggggctggcactgggcaacaggggggggactcccgctccagagcttctcatgggtgcctcagctgagaccacgtccttgctgccctcgtgccgtctgcccctgctgccctcacagccctgttcctgggagccccgttttgacaaacccagcagctcaggctctgcttccagagggccccatccacatctcccccttgcatctccttcatcactcgccatccatgacgttgttctgttttccctgcagcattgcaccctacccaaagtgctcctggttgcctatttgtctctcctctattgtctgtctgccaccagaatgtgaacaccctgagaccaggagcttcgtctgccctgctctgccttccctgccagatgagaacagtgccaggcattaggagattttccacctgaatttgtggtacgaatgaacatgatgaccactattgcccccatctcacagaggagggcacaagcgctcagaaagctgaccatgtttgcaggtgggctccacgggtgatgatccatgagctctgctccgtcaccagcatcatgactggggcaagtccattgccctctctgggcatgggtccccagtcacagaggcacgctgtctgcatgccacatgagatgcccagacagctttacctgaggcattgtgcaaatgagttgaattgtttgaaaagatacctcctggattctcacgctttggttccatcccctataaggagcccagatggccacagcctccctgcctccttggaagacccagagctgggaatgagtatttctatctccccctctttatggattattctttatctctggcttcatgggggcgtaagccaggtagtcatgcttggtttaatggtctgctcttaatgtcttgaaattcttgacagttttaaaaaacattcttaatagtttttgaacaagggttcagattttcactttgccctgggccctgcagattccgtggtcagtctgtgggtgttgtatgcctgaccaatccatgcctgaccaatcccaagggctctgcaggcaccatcgtgtgtagtcctcccaatgaaacatgaagtggtaccatgattatccccattctacaaacaaacaaaccgaggtccatgaagactgggtgatcatgggtcactggattacataacaaggacatggtgggatgggaatttgagccaggtcagtagctctcagagccactactgcctcaagtgtcttgcatacaacattcaacctgtttctgctgagggtataagagcatccccatcatcagccatgaatgaattgattaactgatttcatatcaccctgggaagggaggccatctcttcatctgactgcctccttttcatcttcctcctctgccttaaaaaccttctccctctagggaggcccccaatcatcccagccctcccctactcctcaaagctgggtacacagctcccccacacttcacccacctgtagagttcctaaggccacctgctcttggacaggtgtacctaggtggcacctcacctcctgggagcaggaataaaatctgattcatcaaactgacctccgctgtcccagaaccaagcttggaaatttgtgtggttgggcatcaatttagtgagcacctgctgggttaaaaaaaaattaacaatttatttttacctttccttttaagagaatttaaagacacttgaagaatacataaaataaaagaaagaaacctaaattagaagttgggggaaaaaagaaaatagagaaacatataaaatataaaagaaaataaataaaaatataagataaagccgggaagaaggctacataaacatgctgcggtaggcagaatagtggccctcagaagattccatgtcctaatccttggaacctgtgaatatgtcaccttacatggcaaaaggactttgcagatgtaattaaattaagtcttgagatgaggagattatcctggattatctgcatggactctatgtaattacaagggcctccttttttttttttttctttagacagagtctcactctgttgcccaggctggagtgcaatagcacaatcttggctcactgcaacctctgcctcccaggttcaagcaatgctcatgcctcagcttcccaagtagctggaattacaggcacgcacccccacacctggctagttttttgtatttatggtagagacaggttttgccatgttggccaagctggtcttgaactcctgacatcaactgattccccccaccttggcctcccaaagtgcagggattacaggcgtgagccaccacacttggctcataagggtctctatacaagagagacagaagtgtcagtgaaagagaaagactgaaggagactaatctacaagctttttctgtaaagggccagatagaccacatgtgacattagccgtggtcagtgcatcatgaatgggctagctgtgtgccaataaaactttatttacaaaagcagacagctggcaggatttggccccgggactgtggtttgccaaacactgctttctacaatgtgtttctgaaacacacttgatgacagaagagtcggtgagagggacagagggagactggaggatgctacgctgctggctttgaagatggaggagcaggctgtaagaaaaaaacttttaaaaacctgcaaaagagcaggtgcctccagaagctagaaaagatgaggaaacgaattctctagagcctccagaagggatgcagtcctgccaacaccttgattttagctccccaagacttattttggacttctgacttctaagactgtgggataataaatttgtggttttctaagccactgtgtttgtggtaacttgttacagtcattggaaactaatgcccatacgctagatggtcttggagaccaatactgaacaaattcagctctcagtagccatccactcagagtgaagccccactagttttgtgacccacaaagtacaacagatgaaagagcaacataatttaggccccaaaagaaattttcactaagcgttctcacagcaacagcatcattcctggtgagcattcagatggtgggagcagaggccccaactgttctgaagaaggccctcaagggtgaggggtcttccacagccgccttcgcctttggctgcccacctggaccacccagatgaggaaagatgatttattaaccaattatggaaatgaagccaactcaaatgaaaatgttttcccttgaatccttttttgttttcctaatgaaaaactaacatctacaaaaaatattcgaacagtagagaggtataagagcaggggatatgaggctttatctgtaaagggccagacagaccacacgtgacagcagccatggtcaatgcatcaccaatgggctggctgtgtgccaataaaactttatttgcaaaagcagacaggtggcaggattcggcccaggacttcgatttgccgactcctgctttacacaatgtatttcggaagcacacttgattactcaagattactcaagagttctcaattatctggataattttgccaacccctgatgtggagcaaaaatataattctcttctttcctctgggtcaaccactgggaccactccttgagcatcattcagaagattctaggcatatagaagcagctgcagtcccccgccctgccttctcttattacaccgatggaagcacatagcacttaaaaaatgccacagggggccaggtgcagtggctcattcctgtaatcccagcacttgggaggccaaggtgggtggatcacttgaggtcagaagttcaagatcagcctggccaacatggtgaaaccctgtctctactaaaaatacaaaaattagctgggtgtgggggcgcaaactgtaaccccggcttctagggaggctgaggcaggagaattgcttgaacccaggaggcagagtttgcagtgagctgagatcacgcaactgcactccagcctgggtgacagagtgagactccatctcaaaaaaaaaaaaaaaaaaaaaaaagagtgccacatgctctttttcccatgatgagatttctccacacttttcccgtcatgagatttctgcacactcacctgtccaaatggctcctggacgtctaataaccactcactgtgcaaagccatggggtcaaggcatcctccacccccaccgtgctttggccacctttccctggagagccagcgaggcgggacaaaaagagagctgggatccagtgagggttctgccacatagtgggtaacggttccaagaactgacttggagacacacttgctgtgtgaccttggtcacgttgaccaaacgccccgtttgtcatcatgaagaaacgtctcgtttcttcatctattacatggcagcaatgatacccaaaatgagtttgcagaagactgtttgaaaagtgcctagcaaacgtgcgtgacccagggaaggtgcccggtgacacagtggttgggaatgtactcttgtgttctcctgacatcaggcaactggggctccttaaaggagttgaccgtggtgaaaaagccacactagccactgacttgctgtgtggctttgggtaagtaacttaacttctctgaggctgagtctatatctggaaatggggtgatcattttagctatcacttgttgtaagggctcagtacaaagttgccagataaaatacaggacaccaattaaatctgaatttcagataagcgatgattttttttttaaattcataagtcccaacttttcatttgctccacctggcagccgtatttcagtaagaagattcatgtggagcgtctggctcagtgcctggtctgtcatgggaacttaaaaggtagtccttttacattctgattttgcatgttatcagcaaatggggttatgtctctcactccttacctaccctgatcgttgtgagaattggaccaagtaaggtcccgaaaccaaggccctgtagtccagcttcctgctccctgacagccattcttattcttatttttattattccttgttctccccatccttgaatgccattggcgcacaactgaataaagccagtttcccaggctccagccctccctctctctttctgttgaaggctccctcctgcttctgaaagggggtttccggcagaggagcacccctcaggctgagtaggaggggcagccccctctcaactctgcctgctttggagggtctggcttcaaagacctggagatggcactaaaggtaagagagttttgaaaatacttgttcccatagattctgttttatctgagaaaatcctccctcctccaccctcgtattcccgggaccgtcctcttcccacaatctgcctcttcttgggatccgtcttccttctcccactccagcaccagccacctgtagcctgcaaagcagcagagattctacttcattttccattctttcatattggtttattttatttcacttaatttttttggttaccttttcatttaattcatgtatcttttaaacaaaaaaacacaggcacacaattttaaaagtcaaaaatactcaaaatttataacaacaggaccaacagaacattttcctgtttctgccctccccagtcccaattcccattccctagaaccaactaaggtggactccctttgccgtttcctgtggatggtcactttctaacataacctatactgctattttatgctctctcgggtttaaacattgtcttctgatttcctttaatgaaagatgaggactttgttctcatagtcccacccctcctcaacataccttccctcgccacatccttccaataatagcttgaagctctctgggctaaagacggatccagtttttactgactccctaagtactggccaatcactgcagtcacacacctgtgcacaactgtttgctgtaactttggattctgggttgtgttggtgggccttgtatgagcttcagggggctgagccagtacagtacaggccttcagcacagggctggaccttcttggaaggcctcggatatgaacattgactgttacttcctgtgatgttgtgcacagagcctgagaacctacctaatgggaatgtcaaggagacaaactttccagtcatcccgtctcttacctcatgtcccagaccactctgcccatagggtaccataaaacattattttttaatagatcccacagctatcccaggaataacacaattatatagcattatgattgtgtgtgttaaaagaattgctttgttaaatgtataggggaggaatggcttttcttctaccctcttgggttctgtggccaggcctgataattaactgacaaaagacaaagtaacaggaagaaagcatacgcattatatttggtattagtattactatgtgtacatggacgctttcatatataagaaatgaagacccagagaagcaggtgggcctgagggtttatatataactttaaaaaagaacaattaatagtggagatatatcaagacaaagagaaaagatgtttgggctaggggcagtgaattgtgggtaagtgactagaaaatacttgggggaggtagggtgtggtggctcatgcctgtaatcccagcattttgggaggccgaggcgggtggatcacctgaggtcaggagttcgacaccagtctgaccaacatggtgaaacccccgtctctactaaaaatacaaaaattagccaggcgtggtagtgagcacctgtattcccagctactagggaggctgagggagaattgcttgaacccaggagggagaggttgcagtgagccgagatcacgccactgcactccagcctgggcgacacagcaagactctgtcacaaaaaaaaaaaaagaaaaaaagaaagaaagaaaaaaaataaaatatttgggggaactaatggaagataaagattattttagcagacttgttggtactgattcgtagtattgatgccccttctccagtgataagaatgttctcctcttcctgatacagggagagcagctttctcatgaaaatgtatgccccacttttagatataaagaaggaggtcaaagagccctttctgcatctgccttttctcagtcaccttgaactcaaaataatcagtatgccaaaggtacatattttgggatggcgtgatctgatcctcttcaaatgcaaacattaaaaatatgccagactggtgcggtggctcaggcctgtaatcccagcactttggaaggcggatcatctgaggtcaggagttcgagatcagcctggccatcatagtgaaaccccatctctactaaaaatacaaaaacagccaggtgtggtggcaggcacttgtaatcccagctccttgggaggctgaggcagaattgcttgaacccgggaggtgaaggttgcagtgagccgagatcaagccactgcactccagcctgggcgacagagtgagactccacctaaattaaaaaaaaaaaaagaaaaaaaaaaagaggcacagctttgttttgttttgagatggagtctcgctctttcacccaggctggagtgagtgcaattgtgtgatctcagctcactgcaacctctgcctcccaggttcaagcaattctcctgcctcagcctcctgagtagctgggactacaggcatgcgccaccacacctagctaatttttctgtatttttagtagagacagggtttcaccagcatgagccaccgccctcttgttgcccaggctggagtgcaatggtgcgatctcggctcactgcaacctccacctcccaggctcaagcaatcctcttgcctcagcttcttgagtagctgggattacaggcatgtgccatcatgcctggctaattttgtatctttagtagagacaaggtttctccatgttggtcaggctggtttcgaattcctgacctcaggtgatctgcttgcctcggcctcccaaagtgctgggattacaggcaggagctaccacgcccagcccacattttttttttaagcatatttcttaatatgctggaagttccagaaaaatgaatgagatcttgcccatctcaacctccaaacagtctactgcaacttctggaatggtagaaaaaagtgccatggatatgcacgtctaggggagagggcttggcatttgttagattctcttaagttcctcaagtcaacttcccctttgttaaactgaggaaattttggctcaaagaaacgtatccacttgcccaaggtcacagagctgccagtggtggggtcaggtctgagtccaggtagtctgatcccagattctgtacagtcaagcactgaatcatctggagaaggggtgagggagggggacgagtttcctagggctgctgtcacaaattaccacaacctcggaaatttaaaacaacaggcatttattctctcacatttctggaggtcagaagtccaagatgaatcccactggactgaaatcatgatgtcagcagggctgtactccctagaggttctagagagaacccatttccttgtctttttttaacttctggaggctgcatttcctggcttatggccctgtcctctgtcttcgaagctagcattgtagcatcttgttcatgtcacatgggcttcttctaggtagtcttccctttgcctctgtctaataaggacacttgtgatagcatttagagctcatggggctaatccaggataatgtgcccatattaagatccttaacttggccgggtgctgcagctcatgtctataatcccagcactttgggaggctgaggttggcggatcacctgagggcctggccaacatggtgaaactttgtctctactgaagatacaaaagttagccgggtgtggtggcgcacgcctgtaatcccagctactcggaggctgagacaggagaatcgcttgaatccaggaagcggaggttttggtgagctgagatcacaccactgcactccagcctgggtgagagaccgcgactccatctcaaaaaaaaaaaaaaatcctgaatttaatcgcatccgcaaaagtcctttctgctgtgcaaagtaacattcacaggttccagagatttggacctggatgtctttgaggtcattaatcagcagccctcaaagatgggtctcccacaggctcagtccttactgtatagatttcatggtggcctgggaaagggtaactacagccatggggctcactcttctcccgtaggaggcagagaatttgtcacccagaccaaacaaagagcactcaggcaagcctggccccagtcaggcttacaggttttaaggctccaggggaaaggatgattcttgccccagcagtccccttctccgtcagcccaggggtacttaggagagacaagcaaagggatacgtttccatcccgtacctctgctaagatgctggggaagacaagagagctctggtagagtgtggaggtgaaacctttggtctctggatatagcaggagcagtatttgaactcattgagtccagctgtcgggtgggtggtctcatctctctaagcctcagttatttcacctgcaaaatgggagcaagcagagtccctgtctcagacaactgctgcaagatgtataacccaggtagaaaaacattgagcagagtccctggtacatggtgaactcatgacaaacttgtccatttcaactaaccagtaactgtgacccagtggttctggctgtagtctttgccacacccttggcacctctcttgtttctatgccacattgaatctatcagcatattttcttggctctaccttcaatgtatgccctccatggatactacccttgcccaaaccatcatcatctctctcctggattattgaaaaagacccttcactgccttgctgactcctcagccctcttaccatctctcacttgctacacatcaggatgctgtccaatatggcagccattagccccgtgtggctctgaagcatttgtgatgtggctggtcctaattcagacgtgctgcaagtgtaaaacacacaccagatttcaagcacgtagtacctaaaaaagaatgtaaaagatctcattaataagtttttacattggtgacatgatgaaatgataatattttggataaattggcttcaataaaatacattattcaaattaatttcacctggctcttttttttttttttttttgctttttaaaatgtggcttattagaacatgtaagactccacgtatggctcgcatttgtggttcacattatgtttctattggatggtgctgctctttagcatcttctaagcttgaacttgagtgtcttttgcctgggagtgagcaggtaagccgttcaagggactctgctctgctccagggaaccacagcaaaaacctgttctctgaagatcctgccgagggatttgggtggataaatatttacagttctgaggttgcatttcgaacagctccaacatgtttgcagagtttgtataaacctaatcatcgcaaggcacacggttttcatttcaactgcctttaatcctgcggcccctgagaaaggagatgtgatgacatctcttcaaagtgcgaggccaagtctgctgggaaatggccacaggtatccgcaaaagggcagggcctgatttgggatgttcgctggtggttgcatttttggaagtaatagtggtgtttttaatggccaaactcaattaccctcctaatctgttgtagaataaaaagttaggaattctaagagcctaaggctatacgtaaaacaccactgctcaccactccaaggggacttggcaaaagattttaagttgctgctaatgaaaatttaagttgggtgttgggaacaagaaagcataatttgttgtggttgtgtgtgtgtgtgtgtgtgtgtgtgtgtgtgtgttaaagctatctgatttcattaaattgggctgtggccactattttctgttttactaagcccccaaagagatgttttatcggctgagtgtggtggctcacacctgtaatcccaacactttgggaggccaaagcgggtgatcccaaggtcaggagtttgagaccagcctggccaacatggtgaaaccccgtctctactaaaaatacaaaaaaaaaaaaaaaaatgctgggcgtggtggcttgagcctgtaatctcagctactcgggaggctgaggcaggagaatcgcttgaacctgggaggctgaggttgccgtgagccaagattgcaccactgcactccagcctgggcgacagagcaagactccatcttggggtggatggggtgagaagagatgtcttctcatggtgacattctgcattcctatatgaagtgaaaggaaatggaaactcaggccataagaaagaaaactgaggaaaaatcaggagtgcttaaagacgggctgagaagtaattgattttaagccatatgcagagtgccagattgcaaaatttcaggttgcacaaaggcaaagtttttgaaaaaaatgtgtgggacttaaaccaagtcctaaatagaaggtaaaacaatttacgtggctacaaaagaaaaaagattattctttatattagaacccaagtatcttggtaatgcagacatcatctggttttttgaaactttgaatgggggtgggggaaattataatgaataaagtgtttcctattcttttacttttcacttcctgcagttactggtggagaatttcaccaattgaaaattattaggcaagatttttctttttagaatgcactctatgtatcattctgactgagtcatcttcctaattaattttcgcacaaggataagagtattttggcacctggggaataccactggagtcacgatattattttctatgaaggttaaggttttgcaatcatagataacccataacctttgaaaacagaaattagttttgttaatttcaaattccagcaccctacttgcaatgaaacgatgccactttctttaagttctggcccctcggcaaatggttattttaactgacactcaagtcaaaagctcgtttgtaatgtcctttcatttcagctttatggcaaattaaattatggtttggttaaacaaaattacattaaaaaccatatgtgctgaagaagttttaaggagagtatcacgtttatactttaaaaagcccaactgctctgtttaaagtggatctttcataaacttgcagtcaggagcaacaatgacgtccttcagggagtcaaacactttggaaagaaacgcgaactgaaaatgctattggaggacgcaagaaaaccgaaaacgctcggtcgagtttttctgtcaagccacgtttgaaattaaggaattcgtgtaaattgccatctttcgcatccgaagcaagaaacgtacacagtttccctgctatacggagttgttgtgacataagaaaacagaatctttttaaacctcgagtttaattaattcttttttaaaaaagaatttagcagcagcatgttaaaagggaaaggggggggaacccgattagttccaaataagcgtctcttaatcacccttatgaaggcgtaatttgcaaaacactcctaggaagtaacatctttttcatttcaggggaaaaaaaaagtgcattgataaaaaataagtagaacattttaattaaaactcataaagttgtggacatctggttgggattgttcgccgcggcggtgattagcggatccgtgcacctagataatgaagcctggtcgcggttattggcagaagggcccgggcgcgctgtgagaacgctgcaggctcactttgtagtgcggggcctacgcctattagattccaatcagtttcgcctaaaaaggggaggagggcggagtgggaggggggcccagagttaaacacaggaaacaagcgttgagtgtgtgccaataaaaatggtcacaaatcagggctgctgatgtcataaccctgggggtcgggggtcagggggagtgaatgcgcctgaaagggaccgcctgtctgcggccggagcggcggcgggcgcggggggcgacggcgcgcacaatgggcccggagcgcctcattagagacgcgtttgatgcgctcccgtgccccacgggggccctgggcgatgtcaatgggataattacgatgatctaatggccggctcttttgcatgcaggcccgcctgaatggggcgcctggaggctgcattgaggccgggctgtgtaaactgtagggtgcctcgccgactcggagccgcagagactggcggcgggtcaacttggaccactttgcattcacgctttgaataggcggagcgggaggcgtcctttcccgcggccgcctttcagccgagagagtgacagattggaggtcagcggctggcgggacggaagccctcgccgggcagatggacccgctccgggccgcgccggggacccccgccccgcgcacaggcgtgtctacgcggacgggctccgagcgcacccgcgtgtgcgaggcgatgggcagccgcccgtctcccgatgcagccaagagaacggtggttttgcattttttccaaacctcttcttgtcttaatgacaagagtcaaaccgtctcgcgcttggctcccctcccggcacctgtgcgtttccccagaagccgacttggccccggccaagggcacccgcagagcagcccctaccctccaatattttgcaggaggggagaagaggaaaaagagaactggatatttgatatgtcgaaagaatgatcgatgatgaggctgcaccgtaggagcttgccggtctccgaccgctgctggcctgcgaagccggcacgtttacaaggctcagccctgggctgtcatacttccaccagaacagcagcaaatgcgttcatggcgaattattttgcagacgtgagaactctgatttttttttcagcttctaggacttacacacagttagcctgggtcttttttagcacattgtacatggtactagaattcaataagtatttgttgaatgaattaatcggtaaaaaatgaatatagaagtgtgtacagacaattaggtctcctgttctttgcccttcccccactggtggaatatcttttcctttctcttgtggataaaaaaatcactctctttctgaagcaaatagtgggcattctagaaaaattatactaacagagtaaaaggaaggtaatactctttcatccttgcattctagaaaacttaaattatactaacagagtaaggagagagtaatcattcttcatcatcagttaggacgtgtgtatgttccctttataagattatatactatacatcacatgtcacctatcacattacatggctttgcttttatgagagggatcaaatgatacatgacatttgaaagttgatttaacctacactcactgacattattctgtatcagtaaagatctatgtatattctcccatgaatgcctgcttagtgttctgcagcatggatttgtccttatttaattaagcaatcccccactgatggacatttaggttgtttccagcttttccccctttaaaacaatattgctaagaatatgtttgtacatatattacaaatatatactcttcgtacacttttccaatgatctccttaagatgaataattaatatttcaagggtaaaggatgccatttctcttatatatcctatatttagggctggaatccaacctagtcaataatctagccctgatcacatatgcatattcataaaaatgcacctagctgccaattctctcctccttcttgcgatttaaactcatcctttccaattaagaaacttccttctttttgcagaaattggggtcactgtagggaaaggggggtgtctctgattttattttatccactcttttcttcattcggtgaagtctcttcttcatagctcccaattacaaatagcttcatcttgattgcttccctggagtcataaccctctcacagatccacacacacatttgcacacaggttgagcactaggttacctggaggtcccaaagccacatttggaaacactactcggcacagcaaatgacatcgcaaagtcgatgaaatgaaattgtcaagcgtaagaaaatgcaagccgtgcttcagaacgcgctgctgcccatgtgatgtgcaagtggcatcgagtctgcaggataaattcatcttcagacagaaaacaaaagtggaattgagtggtatttaagcatctaaaaattctactcagttttaataaaacaatataggtatatagtagacatttttttcccaaacaaaaacagtgaaaagtttctcccctacctcatccccgctcccacttcaagattcttcttcccagaggcaaccatttctaccattttcttacatctccccccgtaaaagttctttgcacacatcaacaagctgtacatatgtaggcatctctctctttacccagtaagctacatgctggacacattgtcctgcatttagcccttttcacttaaaatatctgaatcagtattcctttgtgcgaatgaaccacagtttaaccccttgctaataaaacggttgggctcggtcttttgctcctacaatggtcttctcccccaggtaaaccaggtctgttgttaaatcactaccacagaaactgggctgaaagtgcattcagtcttggtcactgttgccaaactgccttccaaagaaacccttccaatttgcactcccccaaatcgggtttcagagtgcctgtttccccacacacttgccccttcaatgtcttgtcaactttttcattcctcaaccagatctggggaaatggtctcaagacatttctgattgctaaacagcctatatgagttttgctggaaactaagctccaagggagagtggaatgattgggctccaaacccccactgagccaggagttagaaattctaagggaggccggccccatggaatgtcttccccatgagaaggaagggcaggtaggttgtgtttaccctgcaggaatgagggagggcctgtgccctggtggggatgggggagggtgggggggcccttcctttgcctggcgtcaccctgccgccgacagtcactttaccccaagggccaagggtcccctggggacccagcagcagggacaccacctggctgctttgagaggtcaaaccccggacaggacctgtccactccgaacgatgcacctgcttaagcatatttaactacagaaggcagcaagatccccacattcccagatgtcatccaaagcctccttgaaattcccatgccttccccacctcccacctcaatcctgcccaagtaataaacagggctgattgcattggaaatgaatgaaattacatatttgaatggtttattttgttgttgttgttggtgtttgagatagagtcccgctctgtccccaggctagagtgcagtggcacgatctcggctcacttcaacctctgcctcccgggttcaagtgattgttgtgcctcagcttcccgagtagctgggatgacaggtgcctgccaccatgcccggctaatttttttgtatttttagtagagacgggctttcgccatgtttgccaggctggtctcgaactcctgacctcgggtgatccatccacctgggcctcccaaaggcctgggattacaggcgtgagccaccatgccctgctatttgaatgatatttgagcaaaacttttgcatacacgacagtccttcaattctttgtctttttccacagctgcttgtaaagcccgcgaaaagggtctggtataaaagattttctttcagctgtgatttcctgcaagactaagggacattgggcatttcagctgctaacctgctaaaaagactactcaatcttttgtattttgggggggcctctctgcattttgcttccttttaaattcacatccaaggaggaatttggagcacttaatttctcacttttccaagttactctctacacgattttgtcagcctggcccaaccagcagcactttctgtgaatacacgattctcactcatttccttctcagagtaagcagcttttttcaccccaaggaaaatgattcttggtcatcattttggatattgacacgaatctggaacattattctgcatttgaacatttgtaaagactttagtgacatgaaaatgtatttctgctacaacaagattttaatctaacttcattgactgttgtttcagaaaaataacatttgcattggtttaagaaaatttttaccttacaattttcatctcctcttccttgttgcctataaatatttttaagaaactggaaataaatgacctgcaaacagccaaagggggacaaaagtgttctggtgttcaaggctgggaggtctttttttccccctaactcttgaaaggaaactgtccattagctcttagatgaagttctcaggtgtttgtgccttcagcaagctgtggtgagtctgagcaaaatgaagctgcgatgcatcagagagttaaatgtaaatagctcctccttgcaggacgcttggctcccgctgtacgtaggtggagtttggaatctggggtcccacaaaccccttgcatttttggttgattgtctttaattacttttgagtgctgagcaaggttgctcatgcctccaggcgtccatgacagacaaggaatgttttttaatgccatgtataaggagcacgtcattaagcatcaaacagagcaaaaatgacaagaatagcgagtgtatcattatggccttcatttaagtagaaaatacagtaaacagaaagaaaaaccaactacacggggtaatggggagcggatttatttgtttcgattgccgactattcagaaaggcatttatactcggattctcaccgcactcaccgaagctttaatttctcaggttgaaggatgaagggacaaagggggaggagggtgaagcgagcaaaggggttctcatctaccctcaagaaaacaagttaaatgccactttagtgtctaaagggaaaaagttatcactaattattttttataatttctttctggggagaagagtaaaatatggagatgttcccatgttgccagagttaagcccatcacatttagcaaatcaaactacgggacactcaattaaatgttaattttagataaacgataatttttttaaggataagtctttctcacgcaatatttgggacatacttatactaaaaaaaagagtattcattgtttatctaaaatgaacatttaacggggtctcctgtgtttaatttggcaacccttttagaggtaggaatccaaatgctggctccttataattccatcatctgtgcatctggatcacaggaaaattaagtgccactccactccataaacagagagattaaatagggggcacgtatgatagtcaaaaggataaataatattatcagtgagttatactttatacccaacagcatacgtttgtattagcaacaatgggcacatgtggaattgcaatggtggaccccgtgaatctgcactgtggaagtagagaggtggacacttgtgttaccggaaaggggtcccgatccagaccccaagaaagggttcttggatctcacacaagaaagaatttgaggtaaatccttagagtaacatgaaagcaagtttattaagaaaataaaggaatcaaagagcggctactccataggcagagcagccctgagggctgctggttgcccatttttatgttttttttaaattatatgttaaacaaggggtggattattcatgagttttcccaggaaaggcatgggcagtttcggagctgcgggctcctcccctttttagaccgtatagggtagcttccagacgttgccatgacatctgtaaactgacatggtgctggtgggagtgtcttctagcatgctaatgcattataattagcaggttatgagcagcgaggacaccaagaggtcactcctgttgccatcttggttttggtgggttatggctggcttctttactacaacctgttttattgggcaggtctttatgacctggatcttgtgctgacctcctatttcatcctgtgattagaatgcccaaccaatgggaaatgcagcccagcaggtttcaggcttattttacccagtccctattcaggatggagttgctctggttcaaacgcctctgacacttgaaccgaggatcgtggcggaaagggctggacatggagattcaaggaatggcctctggccacttcctggtggtgtggccctgagaaagctgcttaaactcctacaccctgggtttcctcatctgtaaaacacaaataactgtacgtgtctccagaacttgtactctccgagataacacaagtaaagcctgaagctcagggatggacgaagagccctcgagaaaccgtgggtgtcctgtggagagacagtgctgcctcacggttaaggacactgggagtgagggagagacaacagaattttggtagcttcctgtccttgggccaatgacttcactctcagagtattcttttttttttttttttctgctgactatccttttaaaatttaaactgcaatcagccctttaaaatggaaatgagatctcgtcattcccctgttcaaagatctcaaatggctccataccacacttggaataaaagccaggccttttacattccctaggagaccccatgtgatgtccccaccacccaccaagggaactgtcactttggccatgctggcctcctctcaactcctcagacctccaacagcactgggactgggggaggcaagaggggtacccggtgtgcaggatttatggaggcctttgctttcaggatcatgcgagttttcacaggttttgcagacgctcatgtgggcctaaaaaatggcaccctataccctctgaggtcgttgtctgtgctttgggaacaattctgacctggcacaaaagattcttgggcctgaggttgaggccaggtgcagaaaattcaaataagctatggaactttctcttcacttatttgatgacatttatcaggtaacagtattgagcacctactgtatccctgctgtaagaccctaacaaaccacccaataagattattttatattttattttattttatttttatttttagagatagggtcttgctctgtcacccaggctggagtgcagtggcccgatcatagccaggttatattttaaaaagatagaactgagctgggcacgtggctcacgcctataaacccagcattttgggtggccaaggcaggaccacttgagcccaggagttcaagaccagccctaggcaacacagtgagacccccatctctacaaaaaatagaaaaaaatatctgggtgtggtggcgcacatttctagtcccaaatacttgggaggctgaggtgggaggatcacttgagcctgggaagttgaggctgcagtgagccatgattgcgccactgcactccaacctgggaaacagagcaatacactatctttaaaaaaaagcactttgtataggccaagcatcagatcaggtgctttataacaattacgtaataaacaatgcccattctttgagtttttgccaagtaggtccagttggcaattagcaaacaataaaagcataattgacatccccattgcacaggtgaggaaacaggaacaagtcactgtcttaaggttgcacagctaggaagtgatggagctgggatttgaacccacagtgtcctgtttttgcttcattcacccttttccctttaccctttgtttttgcccttttcactcatagacaagactaccctgtctttgagctgcatacaacatgtgtgaacccatctgaaaaagaaaggattttgttgaaaaagttgagatcagttgaccagtcaaatcactccaaagtcattagttccggtcaccagacatggttataaggaagtgactaaaaccaacaacagccttttggcctgtgactatttgccgctctcaattgtctagcaatcagagaaccagcctgtggcaaaatgaaaatgatgtttcaggtcacgattgaattgaattgaaatgtttgttcatcttctctccattctcagctgaatttccttgtgtgttagcacaggggtcagaaaactttttctgcaaagggccagagggtaaatattttcagtttatcaggccatatagtcactgttccaacaactcagctctgccgttatagttcaaaagtagccagagatgacagaggaacaattgggcgtggctgtgttccaataaaacttatgcagtcaattctcattactcatagcagttatgttctatgaagttgccatgaagcctgaattggcaaacactcttggggcaggcaaggttgcccttggtcacaatatcttgtcaactgatcaatacataacttcgttttatgtgtgcttctctttaaacataccttatttaatatgcataattgattcattaacattgaactcaaggccaacagccctataactcatccctgaacacagctcaggtgtcagatgagctaaagctacatgtataaacatagcttctccttaaggcacgtatcggccttgctgtactttggaacactagccagcatttctacactacacttgggggccattttgttttaattattatttttttgagacagtgtcttgctccattgcccaggctggagtacagtggtaccatcacggctcactgcagccttgacttcccaggctcaagccatcattctacttcagcctcccaaagctgggaatagaggtgcgcaccaccatgcctggctaattcttttaaagaaatttttgtagaggcaaggtctcactatgttgtccaggctggtcttgaacccctgggctcaagtgatcttcctgtcttggcctcccaaagtgctggcattacaggcatgagccaccatgcctggccttgggggccattttaaatattgaaatcaccaataaaaagcaacaaaatgtgaaaaacatggcactcaatagaccacagaaaagacattagttcagtgtgaaacaaagaggcagggcatcgccctgtttggcctcagtgaggaacacgtgcactgggcaacttaaacttttccctgctttgtgcatgtctaagaatgatcacagaagcacctccagaattgctattgggcttaaaaatacagttcagccagtagccaaatttgcaaactgagaatccgcaaacaatgaggatatcctacatggacactgaaatgtgaagttcgtgtaattcttatgtgtcacaaaatattcttctgattttttttttttttagtcatttaaaaatatagaaaacattcttagcttgtaggttgtacaaaattaggtggtgggccagatttggcctttgggctgtaatttgctgacccctgacatagctgatcaaccttcttgtttttgagatttctcatggaaaaggacggcctggagcctttgaacagggtctgtgtcttcctcctgtgtcagcaatgggtaagtttggctcttctcacataggtaggaaaacgaatgtatcccacatccattgtctaatgctaagatggtgaggcaatagcacctcttaaatacagtgggtagctcgccttactttccaaatataagcaagtaaagggtgagcagttttctgagagctcccagcacactgagttatctcccagtcattggctctgtcgtgacgatgtgagggctagaagaatcaatgcattatttgaagcccagcttttccctttcttaaaattcccttcatccttggagtatctattaatagaagttataaataaaaaaagaaaaaggaaatgccagtcttgtaactcccagagacacatccctgcagccaggacaatgaggccatttattccagcaatggagcccgctctgaatgcccaaaatgctaacaggaactggggcgggaatgctagaactcgctgaaatgccttcgcctcctaattttttgcttacccattggcccttttgtaaagagttctcaagaaaagcccagacatgttggaggagatcgttccccaaaatgcttcccaaaatagatacaggatcaaagtaaaaataaaactgatgtttctccataatctgagacagctttccaagttggggatgattcaaacttttgtcttctcatcatgggggttaaaagctggccagcatcctggaaggagaatttcagtggtgggtattcactgattcattcattcattaacaaacattgtccaaacttctaccatccaccagggactctgcccaactcttaggatgcaagagtgaatagaccaggccagacgcagtggctcacacctgtcatcccagcactttgggaggctgaggtgggaggatcacttgagcccaggagttcgagaccagcctaggcaacatggtgaaaccccgtctccactaaaaatacaaaaattagctgggcatggtggtgcacggtctataatctcagctgaggcatgagaatcgcttgaacctgggaggccgagattgcagtgagatgagatcacgccactgcactccagcctgggcaacagagggagactgtctccaaaaaaaaagtgactagaccattgcctcctggttttgccatctctagaatatcagggataaaggcccagtccaacctaggtatctagaatccttttaggagggttttctgaaaattccatcttgttttcactcaagagttcagagatagtcaagtgacatatgccttaatcaatacacgacaggaaacatctggaatctctcccttctttgcactgaatcttgccaaaataaaaagttaaacttactttgatcagtcaatcaaatcaacatgagattacattagtctggcaatttttttcattttaaaaaaccctctaaatctgtgtttgtgaacacaggaattcattcttgctctgttctgtctctgaaaccttgatgcttttgttaaggatggttttgtgtctgttcttcactctgcaaaatttgcctctggccaaaatcaagaattagctgacttaattccacctaaaatcagctgattttcacagcttcttttatttatttatttatttatttatttatttatttatttatttatttttgaaacagagtctcgctctgtcacccaggctggagtgcagtggcacaatctcacctcactgcaacctccacctttggggttcaagcgatccttctgcctcagcctcctgagtagctgggattacaggtgcccaccaccatgaccggctgattttttacgtgtttagtagagatggggttccaccatgttgcccaggctggtctcaaactcctgacctcaggtgatctgcccacctcagcctcctaaagtgctaggattacaggcatgagtcaccacgcccagcctgattttcactgcttctgagaaaatcttcggaaagcagaggagattattttaagagcaatgggatctggagttgccaaagagcctgcgattccccctggttaatctatctgtctggtaacagaaaagacttaaccgtggaagggagacaccctgacctaagccaaggtggccctctcagtttcttttgtaatagctgtactgtcaacagaggcacgcagccccaggccactttctaagacccaaaccagccagatatctctttgacaacatctatagctctgcctacaccacccaattcatggagagagagtttctaagtaatttgctacaagaagtagatgtcttcactcctgtgaggctggctggaacgtaggtgggaggcggccactgggacatcagatcaagtttggtttctccctgatcacgggccgttagcaaatttgaaagatttcttggccaggcacggtggctcactcctgtaatcccagcactttgggagaccaaggcgggcggatcacgaggtcaggagatcgagaccatcctggctaacacgtgaaactctgtctctactaaaaatacaaaaaaaattagcccagcgtggtggcgggcgcctgtaatcccagctacttgggaggctgaggcagcagaatggcgtgaaccagggaggtggagcttgcagtgagccgagatagtgccactgcacttcagccagggtgacagacagtgactgtctcaaaaaaaaaaaaaaaaaagaaaagaaaagaaagatttcttaagcaataattcctactcaatatggttggacaaatttaaaacctgaattctgagtcacgtagtatctagagcctcacagaaagagaatggaatacaaatttcataacttgacacatttgtgggagatacctggagttggtaagaacctaaagaaaggggctgctcatagactatggaaataaaaattggtattgccttaaacaaaagaggctccacaatgttcatcaaaatgtaaaagcacacatagtctttgctcagaaattctgtttagagcaagggtctgtgaactgcagagatggtaaaagcacagggcccgggccaggcgcggtggctcatgcctgtaatcccagcactttgggaggcccaggcagctgatcacctgaggttgggagttcaagactagcctgaccaacatggagaaaccccatctttactaaaaatacaaaaaattatccgggcgtgatggctcatgcctgtaatcccagctactcaggaggctgaggcaggagaatggcttaaacccgggaggcagaagttgcgatgagccgagatcacgccattgcactccagcctgggcaacaagagcaaaactctgtctcaaaaaaaaaaaaaaaaaagtacaggtcctgcagccagcttctgtacagcccaacaactaaaaacggtctttacatttttacatgatttttaaaaattgaagaatattttatacccaaaatgctaacacgagccaaggcaggaacgatagaatttgctgcaatcacactgaagatgatagaaactcccattttagtgtccataagtgaggtttgattggcacatgcacagccgtgccttatttgtttatgtattttctgcagagttgagccttggcagcagagaccttctgacctgcaaagcctgaaatatttacaccctgcttctttctagaaagggtcggttgacctctgttttctaggaatgtattctaaggaaactatagaaaagcaatgcccatcactgaaggactggttaatgaatgatgaggccatttagaagtattctgcagagctatagagaaggatgtctattgctggacagagatgaccatcattgtttttacttttttggtttttactttttttggtccttctgctaaaaagtcacctgccacctacactgcttgatgttgctgattcttgcaagatgtgctttctgtattattcagaaatattcaatgctgatatcaagagcaataaaaacaaatggaatgaaagaaattcataagaagtgttaattatagatagtgagtgagttagggaggcatgagcatgctggatgcaggcagaatagaggggcaagtgtgctaggcatagagaatagggtgggagagtgagtgttatttgtagataagaagaaatgggaggccccagcaaacctgaaagattcagaagacactgatcccatctccttgaaattgatagttgtgccttttgtaaattctggccccagatgtcgtcggcccaagattgacagatgaaatcggtggctgctcggcaggttctctgtgagttacagctgcgtgcagatgttctcccccaactctatgcagagccaggtgtgcgttggctccaggcacctcctgggtgctgagtccattgcccaccctcagctctggtccttgtaaccacactgtcagcgaggaaagtgatgatgcaggaagagagagagagagagaaagggagggaaggagggagggaggagggaaggaaggaagggagggagaaagaaagagagagagaaagaaagaaagaaagagagagaaagagagagagagaaagaaaggaagaagaaagaaagaaagaaagaaagaaagaaagaaagaaagaaagaaagaaagaaagaaagaaagaaagaaagaaagaaagaaaggggccaggcacggtggctcacgcctgtaatcccagcactttgggagcccgaggtgggtggatcaggagttcaagaccagcctgaccaatacggtgaaaccccatctctactacaaatacaaaaattagccgggcatggtggcacacacctgtaatcccagctactcgggaggctgaagcaggagaatcacttgaaccttggcagcagaggttgcagtgagccaagatcacgccactgcacgcaagcctgggtgacagagtgagactctgtctaaaaaaaaaaaaaaaaaaaagaaagaaagtaggaaggaaggaagaaagagaaagagaaagaaagacagacaaagaaagaaaaagaaagaaagaaagaaagaaagaaagaaagaaagaaagaaagaaagaaagaaggaaagaaagaaaggaaaggagggagagagagagggaaggaaggaaggaaaaagagaaggaaaggaaggaaggaaggaaggaaagaaggagaactggattcgtgtagctcttctatcagcttgttcccatcttaagtgttaacccaccccaaatcactccccttgcttcttatggtatgttttagattaattcaatgaattatgaaatgagggagttgtaaattggtctgtgagcctttctgtcctatggcctctggggcagcctaccaggcagtgttcttgggagtccccattactgcgaggtaattccccacggtgaaagtctaggcgccagcactcaggagccctgtgggggctgctctcggttgcccagcctattctctatggagtggcctgggagagaggtatcttactctggggttgtcaaatataaaagcttaaagttgtccattgggcaaatcacgtggccagccccaagccaaaggcagggaaggtcactctgtcccccacgaggccctagcaatggtgtggtttcttggcactctacattaaagggaagcttctacgaaaagggttcataaccatggcaccactgacatctggtcctggagaattctccatggtggggcctgtcctgggcattgtaggacatttggcagcatctctggcctctacccattagttgccagttacatcctcactcttcccacctcattgtgatgaccaaaaacatctccagacattcccaaatgtttcctggcaggcaaaattgcctgtagttgagaaccacagacttagaccatttatttgctctatagactaaggtgcagtcacctcatttcagccctccttgcctgtattttctttctaggtcagatggccctgccatgtggtgcacacatgctattctccaggtgcctgcttggacccaagtgggagcccagccaggcagtgccctgttgctcacacctgtcatccctccatggaggcagatcagacactcagcaaaatattcaccttgaaaaagcaacagtgatgactggcttgggttttcccagttttattcatgtcttaaatgtcttgccttagtgtttctgttaagtgagttgatttgggatttgagaaatagagtcagattttgtgtgactcctgaccccaccactaactcctcactgaatttgggcaaatgaattcacttaacttgcaaatatgaaatgaggcacaatggcctgccctcatagtgtgatggcaccgggtcagtgtgaagggctgagaccatgacccgagggtgagtgcccaccacgggttagccaggagcccccaagcctctgcaggagacaggccgcaccaccctagtcctcacatcaggatctgatgggaacacaaagacctgcctacaccaagatggggtttctccatgtttgccaggctggtcttgaactcccggcctcaggtgacccacctgccttggcctcccaaagtgctgggactacaggcgtaagccaccgcgcccaggctgaaatactttaaactattcccagcagtacctctggtgtcttaggtatcttcttctagggcagaggccagatttggtccttggctttagaattccagagccctgagtacgaaccagccccatccctcactggctagagaactggagtttctctgagcttcactgctccataaaaacagagcaataacagccataccttgctttatttatttatttatttatttatttatttatttatttatttgaagaatcagtaaaagaatgcaataaaaatgcctggcataatacacggcaaactccccaaaatgctcctgaaggtgcttttacaactcacacactttttaaaagaaaatataagactcccgcattccaacgtcagcagttacaactgataaaccaatatttgccttaacctctagcttccctttccctgcaaggaaacatcggagcttctcaactgggccaaacacactatgggctgtggtttaaaaacaagaaaaaacaaagctaaatccctaaccaaaaggatctgggggtggggggttgttttttcctgagggattttgctaatgccactcaaaaaggaagcccatgcaggcaagaagacacagtcacagggagggtgttgtcactgtgtttaaatcgctgaaggacgtatttattcaggcagaaggaggggagaaaatgtaatggtggaggaaaatatactcatcctccttcctttgatcttcccacattattggcccagctcataagagagagcctgaagtgacaggctgagaggttgctggggtggttttgtggagacagtttagtagagtcattaagatggggccagactggccagtattcaagtcctagttctgtggcttcctagctgtgtgaccttgcacacgtggttaagcctctctgtgctttcatttttttttttaatttagagaaataattgatgcccatcttataataggaatgctgtggtgatgaagggagagaattcacagaccatcttagcctgatagttggcacatagactgtgttttaaaaatattagctattgtctgatacttcttcctttacatgacaaattggcttcatgcatgaacactgaactttttcctcgtgaaaacagatgcttagtttaaaaggggggtgtgtgtaatagcagagaggggttaaaggctatgaacaggcaattcaccggggtgaaaatgcacagtcgaaacactccattaaaaagatgttggccaggcatgatgactgacacctgtaatcccagccctttgggagtccgaggtgggaagatcacttgagtccaggagtttgagaccagcgtggacaacatggcaaaatcctgcctctacaaaaagaaaaaaaaaatacacaaaaaaattagccacgtgtggtggctcgtgcctgtggtcccagctacttgggaggctgaggcaggagaatcacctgagcccaggaggttgaggctgcagtgagccgtgatagtgccactgcacttcatctggggtgacagagtgagaccgtgtctcaaaataaaataaaataaagtaaaaaatgttcagtctcactggaggtctgcaaaatgctcatcaaagattgtagggtgtcagccttcccccctcagagttgccaacatttaaaagcctggtaatattcagtgctagggaaagtacaaggaaacaggcaccctcatacattctgagtacaactactggaaaaagtaagacagtgatattgattatactagaacatgaacttattctcacttttagagagctggccctcagcaataagagtaataaaagtaggggctgggcacggtggctcacacctgtaagcccagcactttgggaggctgaggtgggcggatcatgaggtcaggaatttgagaccagcctggccagtatggtgaaaccccatctctactcaaaatacaaaaattagccgggcataatcccagctactcgggaggctgaggcaggagaattgcttgaacccaggaggcggaaggtacagtgagctgagatcacgccattgcactccagctctgggcgacagagcaagactccctctccgggggggaaataaaagagtaataagagtaggagcgaatgagcatgaacagaagaggacgtgcaatgcctggaaatatcctgcaccccagcaataggtgacatgcatctttgcatgtctgcaatccagcacgtcaggcagctatcgaaaggaatacttagagctgtaagtattaataataagtgatattgattaaatgcttgccctccaccgaacacagcaatgaagctctctctatgcatgctatttgtgtctactgtaacctacaatagatttgttacctaattttataggggaggaaaacgagcgcactacggggtaaaggaggtcacccaagatctcaagttcacgagtggcagcctggattcaagtccctgcctgcctccagaacctgagctctgaaacgctggactaatcagaacctcttggccctgaaaaatgaggcctattgaacaaagacatttgtgagaaaagggactattacaacctagtgtaaagtaacaagcaaataaaaaatgaaatggcacaactcctccccacgctccgaactctcgaccctccttcatggttctgcatagccctcaccctgcaacacacacaccatttgtatattgctcactctctgtcttcctccactagaatgcaagcttcctagagcaggcctctgctgttttgtgcctctagtccacaaggagagtgtactggtgccctgtggacacgaggtaagtgttaaatgaatgagtagatgcatcgctttactttcaccttaaccctgaaagcggttagccactagctgggccacaaggatcgggctggggagacttgtagcctgtagctggtgattgatgttgaggacaaagtcaactggcatctgggaaagcctgggtttgagagaaaagaagccgcaactgccatattgcttcccgtatagtaaccaccaagcacttgcaatgaactagatgacgacttggtaaatctggaagctaaatttcttttggcggcagactgaaaggcttggcagcttctagctgtgtaaattaaaacaataagctgttttcttaaaaataacatttctaaatatgcatacccttgaattaacatccagctcatgagaccgtcaacagaagacagggaccctggctgcatgccccgtgagcgcccctgctgcagcgagagccactgctgacctttccagagtgtcctagggagagcagcagcacccagcaaggctctctctccagggccttgacgcatgtgggttggacatggccagttactgccactgtagccaggcaccgaggactgatggccaaaaaaaaaaaaagaaaagaaaaaaagttggttgcagctgtagttaatttacttttgattagtctaacctttccccctatgaggaagttgtttagcaggaggggaaaatgcggtcacaatattgttttatgactgtttatctttagagtccaagcgatgctgattgcaaatatttatgcacatttttaaaaatctcagctaatgcttggaatgtgttttttttaaaaaagagtgaaatcagatttcgggtggatctagccattttggaggatttcaaagtcataacccggtttcccctaccggcccactgggactaatggcatcaatgcagcaattaagcgaacgggatcgaaatacagaatgtgaccgctctgtgtggctttggaaggcttgtgtcggttttaaatgtacattattaatggccagcctagaaatctaagtccaggcatatattatattaaagaaaagaacctctgaatgagaaaactttgcatttctgctagaaatgctgctttcctctgagagaaaccatcagccacgtgtcaaaaaaaaaagctctagatgcaatttcctcacctcccaagtagccactgtggtcgaggctgccaccctgagctgaaagagctccatgcctcttctaattctttgcttctctccagcggtgcttgtgcctgctggtttggtgtctggttatgttctttagcctcttaagataatgcgcggatgtcaaggagcctcatgtcatggggagctctttggcttcagggttacatggattggggtttgaatcccagttttgccagttttactgtggctgtacagaaagcgatttaacttctcaaattctgtgtcctctctataaaatgggggaaaatgatactcactcagtactatgttggttgcaaactggcttaataaaagaaaaggggggccgggcgtggtggctcatgcccgtaatcccagcattttgggaagccgaggcgtgtggatcacgaggtcaagagattgagaccatcctggccaaaatggcaaaacttcttctctactaaaattacaaaagttagcaagccgggtgtggtggctcatgcctataatcccagcactttgggaggctgaggtgggtggttcacctaaggtcaggagttcaagatcagcctggccaacatggtgaaaccccatctctaccaaaaatacaaaaattagctggacgtggtggcaggcgcctgtagtcccagctactcaggaggctgaggcagaagaattgcttgaacctgggaggcggaggttgcagtgagctgagatcacgccactgcactccagcctggcaacagggcaagactccatcaaaaaaaaaaaaaaaaagaagaaaaaggggactaagtgactcagggaaatgggaagcccagggacagcttcaggctcggctatatccagcagatgtcaatgatgtcatcaggcgagttcactctccttctccctcattctctatctctgacttctctttctccctgggtattggcccctcctcctccgttgcagatagacttgcttcctacatagggaacatgtcaccaagtggtcctagttttacttccttccaacatcatgatgccaaagcaaagggtctttctccttctccccagctccaaacagaaggatctgaggaaaccactctaatttgctaactttcatcttagatctgccttggtctgagtcccatgtcctgagtcatgaagggctgcactggtcaggatgggtcctggagcttggtgtcaggccatgctgatcagtggcccccctttaatcacatgggcagggagagagagcgtcattctctcagggaagtggtggagggtgttgtccccaggaccatcttgcaatatcgactcagttaatgttgcctgtgtacctgctgtgtgccatgaagcctcctgaacagagggacaccagggtgagcacaacggacacggtccctgtcctcaaggactttcacaggggaggggtgggggagaccgtcaacaagcacatgaataaatgtgcaaggttgtttcagaggttgatggagacagagactgcagggagggtgggctgcggctgctctagggacagcagacaaggtctgagccaggatctgagccaagatctaatgaaaagacaagaagtccatcctttgtgggatgctccagaggaagaatgctgaagggtgagagaatggcgagttcagagaactggaggctgctgtgaccaggacccttggggtcaccaaaggaagacctgagaggattaaggggagagatggatttggagaataaagaactagatcattaatggcctctttggccacaaaaaggagtttggagtttgctttcagtgttttgggaagcccttggtgggtttccacaggggagcgtcgtgtgatctgatttgagcagctggtgaagtttgcagtattgtgtggcagaggttcctttgatatctgttatcccatttctctgagaaaaataagcactgaattttgactggacacacctggccaccaggagtaagaaccacatttcccaagcattaatactaagttctggataatgggatggaaatgggaatattacatatgatttccaaaaaatgtccttgaggagagggaatatgccctttgactccctcctctcttcctgctggctctaatgcagacacatgcttggggtttgggcaatcattcgggggtaagaggtgtgagtcatgagcagaggatggctgagcagctagaaagaagagacctgaggaccccagagctactctatcagccctggcttgctttcctctagaaagagataaatccactgtataccactcatgtcattgttatttgggggtttcaactacttgcagccaaacctgactatgtctgattgagggggcaagaatagaaacaaaaggaccagttaggaagtggatgtgtccttccatgcaataaggggtgttggctccaactaggcagagtagcaatggaagtaggaggaaggggctggatttgagaaatatctcaaatccagaacatttggagggcttcctgatgcattggctgtgactggtcagggaaagaaaggattcagaaggccaaggcgggtggatcacgaggtcaggagatcgagaccatccgggctaacacggtgaaaccccgtctatactaaaaaatacaaaaaattagctgggcgtggtggcaggcacctgtagtcccagctactcaggaggctgagacagaagaatggcatggacacagcaggcagagtttgcagtgagccgagatcgcaccactgcactccagcctgggcgacagagtgagacgcagtctcaaaaaaaaaaaaaaaaaaagaaaaaagaaaggattcataggtaatttcaattttgcttgcatgaaacagtgggtgggccaggctgccccactgagtagacgacgaatcagagaaaaaaggcatgacaagacgcacaaaaatgttaattctcaaaattgtagttcattttttcacagattgcccttaaagtagtaaaatacatttagttcattcaccagagatttgttgagcagctactctgtgccaaacactgggtatacagcaagagatgaagcaaacatgcccctgccctgatggaaggtggtgtctggaaggtcgtgtctggaaggtcgtatctggaaggtcgtgtctggtggattcatctgctggtggctggaccctttgggcatttctgaaatcgactgtgacactggataggtcttttcacctcaccaagtctcagtctgactttctgtaaaatgtgtttagggcaggtatctgcttgccagggctgcacaggaaaggccctcgctgtgggtgaaatgcgtgtgtccctccaaaattcatatgctggaacctaacccccagtgtgatagtattaagtggggaggcccttggggagtgactaagtcatgagggctccaccctggtgaataggatgaggctgttctgttcttctgttcttctccctcgtgaagaagcaacaagaaggcatcatcttggaagcagaaagcaaaccctcattgaacctgctggcgcctggatcgtgggctccccagccttagaaccgtaagcaatacatttttctttttttcttttcttttctttctttctctctctctctcttttttttttttttttttttttttttttttgaagcggagtctcgctctgttgcccaggctggagtgcattggtgtgatctcggctcactgcaacctccaccttccgggttcaagcacttatccctgcctcggcttcccgagtagctgggattgcaggcgccccacaccacgcccgatttttttttttattttttatttttttgtagttttagtagagacagagtttctccatgttggctaggctggtctagaactctaaatctcaggtgatccacccgcctcggcctcccaaagtgctgggattacaggcgtgagccaccgcacccagcctacatttctattatttataaatgacccagtctgtagtattttgttatagcagcagaaatggaccaatggtgcttaaagtagcaggtggtagtattacaggcctgtcatctgggtgtgaaatactagaatttcagcaaatatgcaagtgcctgggattgataggataggacattagaaatctagacagtttcagtctaggcgtagggtgctcctcctggcccagctgcatacagggagggggtcgtgatgtgctagtgctgtgcggggcacaccctctagggggcaagcccagccaccgtctacctgcagccacgtttctgaggcaagcacctgactctggacacatgtgattggtccagaggtgggcacctgacccaagctgggccaatcaggcctctctgttgggattgtggttggagacagctggtctatccttgaggctgccggcctatgacttgcaaactcctagtagagggacagtgcctttacttggatcaagcagtaatcagtgtggctaaggttgaagtctgcaaatgtctgattctgaagcccatggtgttaaccaccctgtgtcctgctgcttctggtacccagatcagatttctcttttctctgcagggaggaagcacacatcctcttcactgcgtattctttcttcttcttcacaccgtccccagttattggagtgctgcagaaaacgtgtagccaggcacatgtcaatgacacgtttcagcagggtgcctcctcagatatgggatttccaggtcaagcagtgtgtgattctgatatttgctgaaattgccctctaggttaatctgtatttaaatcgaatcctgaagcagaaatggtcaaaacaattcttggttatacttatttagaagacatgggcaatgaatgaaaccaaacaaacaaacaaaatctcttcccccaagcccctaacccctcagctggaattcacggagctctgctgaattattgctggtttttaaatcactgaatgtggtttgtggaattgttctcataaatggcaaaaatgtaacaaatgcatacatagtaaccaagtaaattggcctgttaagaaataaaaagggtaattaaaagggtactcacagttccaatctgaaataatatgatgagaagatttttaaaactaccatttgttgagagctgtgatgtacagagtcttcagatgcatctgatttaatcttcctagcaactcccaggaacagaggccattattatcccccattttacagacaagaagaacgaagtttacagggaaagtggcttgcagggttgggttttggactacacgcagcctctaaaatctctctcaaggtacctgcttcttcataagcttcacattctctttaaaagatactcacaaagaacatgaatgctttcttttgtaatatcaaaagtaataaacataaaaaaactagctgggggtgtgtgtgctatgtgcctgtgggcccaactactcaggaggctgaggcgggaggatcacttgacctcaggagatggaggctgcagtgagccgtgatcatatcgtgctgttgcactccatcctgagcaacaaagcaaggctctgtcagaagaaagaaagagagaaagagaagaaagaaagagaagagagaaagagaagaaagagagaaaggagaaaaggaaagaaagagagaaagaaagaaagaaaaaagaaagaaagaaagaaagaaagaaagaaagaaagaaagaaagaaagaaagaaagagaaagaaagaaaaaagaaaagaaaggaagggaggggaagggaacggaagggaagggagggggaggggagggggatgggggagagaaggggaaggggagaaagaaagaagaaggaaagaaagaaagagaaagaaagtgatagagatgaagagagtgtcatcttcacacaatgaagaaaggagtgattagatcacaaacttggccttccagccaggcaaccccaccttcaggactttctccctctgtgcatatctggtcttctggtgtggttcctgcacacatggcttcggtcctccacaccactgcctgagtgcgaggtgctctggggtagagatgaaacggcagtatgccctacaacctgcccctgctcaaacaaagggcggttttcacttgcaaatggtggctccagattgaccaaaaattaaaaagcagaaaagcaagagttggccagtttgcaatggaaaaaccactctctgaacatcggaaacattctgtgcagtgttaaagagcattctcctaaatgaagaattgacttgtctgtttaatgtagctttttcttgatttttcttgatgccactcatagcaagtggtatttttcaaaaattatgatctgtctgaaactgatacactcaggcttggtggttggactggccactgataattggaaacaggaactgtgcaagcggcattcttcaagggaagagcaaggaaaggcaaacacacacattcccggaggacttgtgacaaacaaggatggctcgggtctggttttcaacccacaggctcaagacttttattccttttgaatttaaaagaccagatgttggtgagtattggatgtccaatgtcactgtcaactgccaagaatgtccagttttttgtttttttttttgacagggtcttgctctattgcccaggctggagtgcagtgacgtgatcacagctcactgcagcctccacctcccgggctcaagtgatcctcccacctcagcaccacccccttacaccccacagtagctgagactacaggcacatgccactgtgcccagctaatttttgtgtagatggggtttcgccatgtttcccaggcgggtcttgaactcctaggttcaagcagtctttctgccccagcctcccaaagtgctaggattccaggcatgagccaccatgcccagccgatgtccagttgttgcagcaagtcctgagaggcaacaaggtgggcagaacttcctctagaagctgaaaatggcttctccctagaacctccagaaaagaacacagccctgctgatccttgattatagcccaatgagatacatttcagacttctggcctccagaatgggaagataatacaatagtgttgttttagtctatgaaacttttagtgaagtgttagagcagctctgggaaatgaccagcataactgaggcactgggcaagttgattacttttctggattcccttttcttttcatttgtaaactcgtataatctaagggaagtgtgtatatttccttaccgtcttttaccatcacgtgacaacaagttggtgcaaaaattcttctttgattgcaacactgggtagaataaaaaaacaaaaactatgtaaaacagaaaatcggttcttgcaaaaaggaagcaaattgaaacatagaacgtttgagtttcatttagaattgtaaaagcatggcattccaatgctctcctcccatgagcatctgcaaactacggcgccgagctaggagaacagagtctcccgttctacatttcaaatgtgagcacagtctgtcaaaggtaaatcacacacttccatcggctggcatttttcaaaagatcaattatgtactgacatctccgtgcatataggcacaggattatttacagccaccacgcgaggctgagacgtagtgagaatctggccctaagcacagtacagaaattcatactcagacggctgaggaacgaaggcagttctggaagctcagtggactgtcagagcttctgccttacagtggccggtgcgtggtggagctgcccacaccacaggtggccctttcccgtcctctctttcccctcccagatctgctgttagtttcccagcctggggcttcccactgcccacttccacccaggacgagggacgggaaggctctcagggagccgccaagtcagtccaacccaaacacctgtcagagaaactcggctcatcaacaggagtccacgtgatggcttaaaaacagtctgtgctggctcatgacacgcgaggcataaattaaatcataactgagcatgctgttgacagcacgtgatgacaggtgttgtgaatgagttggcgcaggggccactgccctgcctcgcgactgtcagtcatggccactcctcgctcctctcccgctgaaggggatggcttgtctagcgatgaggggagagccattcgaggtatccggggtgggaattggctcgggcatgtctcattctccacagatggcatcggagccccgtggtgtcagcgcatctcccaccagtggctgggccgaagcctctctcaggtgtgcagtcctggggccctgggcccgttcacccatgcagggagctcttctcccggcaccctagtgtccacacccgtcccaggttcctcagctgcagtgcacacagtgaaggcaccagcaaagcagggacagccaggaacagagcaaaaccatagggaaatgcattgatgagcgatatttccaaaatcaaaggtctcggccgggcaccgtggctcacacctgtagtcttagcacgttgggaggctgagatgggaagattgcttgagcccaggagttggagaccagtctgggcaagagagcaagaccctgtctctataaaaaataaaaaattaataaaaattagccaggcttggtggtggtgcacctatagtcccagttactagggaggctgaggcaggaggatccctggagtccaggagtttgaggttacagtgagctaggatcacaccactgcacttcagcccaggtgacagagaccctacttctaaaaataaatatatatggcggggctccatagctcatgcctgcaatcccagcactttgggaggctgaggcgggcagatcacttgaggtcagaagatcgagatcatcctggccaacatgatgaaaccttgtctcttctaaaaatacaaaaattagctgggcatggtggcgcacgcctgtcatttcagctacttgggaggctgaggcaggagaatcgcttgaatccgggaggcagaggttgcagtgagctaagatcacgccactgcattctagcctggtgacagagcaagactccgtctcaaaatataaataaaaataaagaaataaaaataaaaatatataaaaggtctccaagtagtggaacatttcagaactttgttggacttcctatttatgttatgaatgattacagttttttgaaattgcctatggcagaaaaaccgtagtccttagattgtttctgaaaatgccttctagtctgagaaaccccaaacccagactccacttcacttccattctcactgtcaggatggcttctccctgggaaacccgtaagtcttctcattccttcttcccaaacagcccccactaggctgcctttcaccaggccgccttctaaccccaactttcaggtccaattccaaagctccctctcccaagagccctccgtgaacgtcctggtgaaaactggcctgcgccgtggctaccacgcatcatcccgcccattttgaccatagcacttgtcacaatctgaagttgtcctggtgaaatctgcgggctcatcgtcttccacgaagcccctggatggcagggatcccacccagcttgctcgtgacagtcccctaccctggccctgcacctggcgtgaaggataagctctgcggacgttcccggagtgaaatgagtggatatgtaaaccaaacgcgcccgggtgccctgggcatcttctgtgcccgaccccagtcatcgctcctctgctctgtgccttcatggcaggatgaccaaagaggagttgtgacagctgtcacagtgtgttactgtcaccacgggccaggtttcaccttgggccacacacgcagtcccagcagctccaacccgagatgcgtcttctgcttagcctggggctcactccagccccaaaggctgcatgtccctgtgtgcggggagtttgcaggagagcaggtacaggtggctggctgaggttacctcctgtcaccatctctcctgccttcccccgacccagccaaccacagacttgggatggctggaatgaacggaggggactggtgcagaggggtttcagacacctcaaaaatactggagagaggtggctgagcacggcaattagatagtaattcctctccatgctgctcgtgaggcactggcagatatggaccctgctggaagcaacccacagcccagcctccagaagctcgctgtcatgtggggcagggctgcaaggccagacacgtgctaagcctttttgcacaaactgcttatttgtttttttcttcacactccattgaagtagctattcttattttccccatattatgacttaaggaattgaaccttggagaggtaacgaggctggccacggtcacgcaggtgcaagtggcagggaggcgaggcaaggcttcgaactcacttctctcaggctgcaaagcccggaatcgaaacgactcctctgggtcctgcagctccatattctccgagccctggaacattctgaggaagagggaaataatctcccttctgatatctgcaggggactctgccaaaagcgcccagggaggaaaggatgttcttgtttgagtctagagcaccgcctctcacaagcttagtggaggaggaagtgggagtggatgtgggctagagagaccctcagactcggggcttctttttgttttttttgaggcagagtcttgctctgtcacccaggctggagtgcagtggcgcaatctaagctcactgctgggattacaggcatgagccaccacgcccggcctcagactcggggcttctaaagcggagctgagttttcttaacctggcagacagttgctgggcagagtgcatgttcagagccccaagctgcgaacctttctctctaagtgtcttcccctggtatagaaaagcagaaagcgtttgcagggtaagacctccagattccagttcaaaatatttccttggatcttgccatttaaagcctcttaataggcactatcctacttctttctctacctaagcagattgagaggccttggaggaggggacgccatccacagacctagctggaaggattattgatggattcaaggaggccacgtgcttttaagtggggtccaaaagaaatacaatgccagtcacagatgtaattttatgttttctagtagctacgttataaaaagcaaaaaagaaacgtggcggactttttgttgctgtaaaaacacattacattaaatttaccatcttaataatttttaagtgtatggctcagcatgttacatatattcacattgtcatgcaacaatcctggtgacatttattttaatgatgttgtttatttaactccatatgtaccaagtattaccatttcaacatgtaatcaatatacaatcgttaacaaggtactttacttttttctttaatttctttaaattttctttgaaatctggtgtgcatttttttacttatagcacagctcaatgcaggcactaaattttcaatgaaaatatttatcactgtttgaatgttacgaaatttacagttgaaaaggcagatcaccacaccttccgcattcttggaagttttccagtaactgaattgccagcttttgagtttaaattacttaaaattaaataacatttggccgggcacggtggctgatgcctgtaatcccagcactttgggaggctgaggcaggctgatcacttgaggtcaggagttcgaaactagcctggccaacatggtaaaaccccgtctctactaaaaatacaaaaattagccgggcgtggtggtgcacgcctgtaatctcagtgactcgggaggctgagacaggagaatcgcttgaacccaggaggcagaggttgcagtgagccaagatcgtgccactgcagtccagcctgggcaacaagagcaaaactccatctcaaaataataataataataataaataaaattaaacgacattttaaaaattcagctcctccatcacacaggccacacatcacaggggcagtagcctcgtgtggctggtggctcctgtgttggccagtacaggtcaggaacttctagaaagtgcttcccaagtggtagcagtgattgtcctactataactagcagaatgacaggaaatggagggtttctcgtcttgacctcaacagtgactaccctggtcaaggaagccggctggttcacatcccccaccccgagccgcaactcaggaccagcccaccccattctggggaggggaaacattcacagctgaacttctctctctccctgctgaccctagtaaatgaggagactggactgggaggggaaaaaagacttcagactgaaaattaagaatcaccctggcttattttatcactggaagatcacttcaacaacttcctccaggaaattgcaaagggaagtcattatccaaggcggggaggggaagacggtccacgtgaagcgcagatgccgcccccgtgcaggggagagtaggggcaggggcgggtgtttactgggtcatttaaccgggtttctattttttaaagtttccttttctacgactatttgttgaccctaattgtttccatgcccatgagatgcgtccctgaacttcctcctgcggcctgtcggtggggccgggtggctccctctaattgcctgtgttcctgccttttccctcgagtctccagggcaggccagttcccacatatgcttccagaaccatcttaatagaggggcagcagcgcccagctgacgacatatgtttagctgcttgctgaggtcggccaagcgtgcaatatcacattacatgaatggggagggtcaggcccaaacaagctgctttttacaagcgctggcttaaggatttgctgctaatagggctaacatggtgggggagtggggggtgggtagcaggcttcttgtccagctctgctctctgtctccgttttgcattgattagaaggttttcggtctcccaggacaacgctctgttagaaaacgcctttgcagctactggggttcccggaccgaggtgaaaacgggggccttgagccgggaaaaatgcggtcgagggtctcttgatatgtggggcttcaggacgcgagctgagagccctgccgtgaagagccagcagccctctgcccgctggccgctgcatttatgctccattaagcccacgcaggcccgaggggtagatggcggcaaagcagagaaagacaggccaaggctgctttcacccgggccagtgccagtgtagatgcgggcaaatgcaaggccaccactcacctgttggggccctacagctgcccgctggaccccagaatgtgcctgcacaaactccactcccgaaatcatcacaggccctccttgaacccgagccagccgagggcctggagaacattccggacagaaatcaaaatgaatttcaggtgctgggtgcggtgactcatgcctgtaatcccagtacgttgggagactgaggcaggtggatcacttgaggtaaggagttcgaaaccagcctggccaatatggtgaaatgctgtctctactaaaaatataaaaagtagccaggtgtgggggtgcgcacctgtaatcccagctactggggaggctgaggcagaattgcttgaacctaggaggaggaggttgcagtgagctgagatcacactactgcactccagcctgagcaacagaccgaaattctgtctaaaaaaaaaaaaaagtgacaatcagggtcccctgtcaacaacagtgaggacgaagtcatctactgagctctcactgcatccatggactaactgatttaatcttcacaacacccagagaggggagcactattattatgcccatttaaaagctgagaacgtagaggcagaacagttgaagtaattgacccaaggttggcttctatcacagtaccattcatgccttctcatgcaactggatatttaaaaatttccttccttccctccctttttctcttcctcccttccttccctcactgcttacatttttgatatgaaagctgctcttagtttttaaaaaagaagccaatgatacaaaagtgaggaaggtaagacatcaaagtgtcccacacctgtgccttactcctcttaagctgctcatcatttcatcagtatcacgttcacacacagtgtttttagtaagtaaatgtcatgaattcattcaacaaacattcgttgaggattcagaacatgtaaaggattgtgctatggggtagatgtttctcaacttcagtactaatggcattcggggctgattaattctctgtcttgcggggctgtgctgtgcactgtggggtgttctgccgcatccctggcctctgctcatcagatgccgcagcacgcaccccttagttgcgacaaccaaaaatgtctccggacatggccacgtgtcccgtggagcctaatgtcatccctggatgagaaccactggtctaggtggatagagctgtacggggctcttctgctgaactttcccttagctgttgcagagtggcgtcctgaggcttaagctcagacattcctaactctcactttttacaccagattcaagagtatggaggtgctagaacttagtgaactccccattaatagatatttggggctgtttccattttttctgcataagaatcaatgtcacaactgcttgttcacacctgcatctgcatacacacatctgagtattactacaggacagattccagcaaaattgctggatcaaagtataggcatttaaatgtttgctataaaatgttaacatcccctcccaaagagggttgtaccgattcgtcctctcactgaggacatttgagagtgcctgctaaccgcccccttgctgacagggatcaaagccatcaggaagagccctccgaagaacagaatgagttgaatgtgtcagagaaaagaggtgatcccacgtttcactcaacggggctcttaggtcatttgtttgcactttgcttttaaccttatttttcatgaaataaacataattactcaaagtggcaatttcaaaatttccaacatgcataaatagaggactcgcatttgaacttcaaaatattaatgaataaattagaagcacgtgggcgggtcctagattagtgaccctgttgcaaagagagagggcctggcagactagcccaacctcaggattcctctgccatcccaggatgcaggccaagctctgagtcccagagacatgtggatagcccaggtgcatcatctctgaaggccatgcaaggcaggttgggggccgtacccgcagagacctgtgctccccagagacagtggatgtcctaaagaggacggctccctgaggtcaccctcctcactgtaataacctgctgctcttctgccttcaggttccccttccaatgacaaatctctggctcagtttgcatttcccctctgaattaaatttgaagcaagaaattattttttttctgtttgaatacagataggagagcaggctgggtgcggtggctcacacctgtaatcccagtactttgggaggccaaagcgggtggatcacctgaggtcaggcgtttgagaatagcctggccaacagggcaaaactccatctctactaaaaataaaaaaaattagccaggcatggtggcacgtgcctgtaatcccagctacttgggaggctggagaattgtttgaacccaggaggtggaggttgcagtgagccgagatcatgccactgcactccagcctgggcaacagagactgactcaaaaagcaaaacaaaacaaaaacaacaacaacaagaacaaataggcaagtaaaaatgcctctctggaatttcaagataatgttgtcgatttgatcacaatgggaacctccaatctttgcaatggttattcaaatggataacactctgaacatctatttttttaaaaaaaactaaatgagatgaaattatagaaatagctaaatcatgcatatgggtgcaacatttcaaaggcaaagaaaaagttataatgagggaagtaagcttccctccctgctcctgtacacccagaggcaaccactgttactattggggtaacccacatgacatttcaatatttacttgttttccaccaacaaaaatggcagtttcactggatgcagtggctcacacctatcatcccaggatggcttgagcccaggagtttgagaccagcctgggcaacatagggagacctcatctccacaaaagcacaaaaattagccagatatggtggtacaccattagtctcagctactcaggaggctgagatgggaggatcacttgagcctgggcagtcaaggctgcagtgagccataattgtaccacttcactccagtctaggtgacagagtaggaacctgtccaaaaaaaaaaatgacagtttcatatgattcagtctgttactcccagtttctcattttctcagatactctgtgtgtataaatacacacttagacagaatctttctgttttcttttttatataaattacagcaaattatacacactgtttttcatcttgcttatttcacttaacaatgtatcttgaaggtagctccattttagtatttaaagaagagcttcattctctttttaacagccacggaatattctgttgaatggatgtgtcacgatctatttagccagcccccagtgatggacaattagattgttttcagtctctttctaccaaaaacaatgctgcaatgcctatctttgtacacacattatgtctcacaagtgggagtatgtttgcgggataataagttattcaaggtggaattgctgggccaaaggatgtgtgtctttttcattaggaaatctattgcctaattgtcctccatagacgttgcgtcaattcataccctgagtagactgacaggtccagcttgacactgtgcctgattttaaggtccacagagcaatgaatgttctccacggctctgagatgagtggcactaccggggcagtctgggaaatgtggagtgtctagataacgtgccaagtttggctctgtctcctccaaaaggcagataaggatagggaagtctcctctgcaaagcagtctcttagcctggaaggttgtggctgggaaaaggaaaggaggggtgtctccatgtattggagatgaaagagggaagttaggccctaagaccctctggactctcttctgctcccaacctaggaagggctgtcaccccagaggctgttcaacctcaggtgcccacttcacaagcattaggtaaaagacactgttgacacagtatgtggctaatgtgtgtgccacagattgatcatcatcaggtggcacgagtttctggtctaccagcgtgctctggcaaaccagttgaccatcattaggctagggatggacaagccagtggctggtcttgggaagcagtttagcatgtttcaatatgttcttaatttctttaacattctcccttcagaaggtgaaaatggattccctccccttcaatgtgggacaggctggatggtgaaataatcatctgtgacttgcaagactgactcatgcaaggcaatacagcttctgctggctctctccttcttggattgcccattgtgggaaaagccagctgccatgttgtaaggacacttaagcagcctgtagaggggcccacatggggaggaagtgaagctcctcaccaaccagcagcaccaaattgtcagtcaccttggacatcaccttggaagtggatcctccagccccagtcaagccttcagatgactgtggctttggtcaacttcgtgactacaacctcatgagagaccctgagtcagaactggtcagcaaaagggctcctgtatttctaactcatagaaactggaagaatatacatgtttattgctgttttaggacactaagttctggataatttattgcccagtaataagtaaccatacatatggccaggttgatcaacttgtgatgagcctgttctatctgcttctttgcctctacttcatgtctcccagccttgcgaggagggagagatcctcttcaaatgacatggaagagcagattctacatcttctatgaggtcaacatgaaggaaatgtagcccattacgagaggtcaagaaggatcctgaatgttcctcttcaccttcactgctaccctgtcactgcagggtgtgggagcatttcataagctcccttaccctcagctgtgtcatctgaaaaatggggtgataaccaaagatgtagtgtgggcccagataagctcttcaagtcccttaaagcattgagcaccagcttttatacattttaattcattcacgcatcaatcatccatttatccactcagcaaatttatgctaaatgcctacaatgttttaggtaccatgagaggtgctagggatatgaaagagagcaaatcaatatccctgttatcaaggggatcccagtccaatgggagagaagatggagagatggaccagtaacacatgatgtaatacaactgtgccagggctgaatgattacagtaaggagagcggccccctcccagggtggaggagcagagacatacagactgtgactcctgagtgggccctaagacccctgccctgcagaaccacaaaaccaggcatagtgttccaggttcttgatccagtgtaagtggcaaaaatggaatcagagaagcttgggatatgaggctagacatcctgatgacctagctggacatatgcactaagtaaggtccagagggaggagaacttgcccagggttatgcagatcctttcaccccttgaacttgcccagttcattgcttcccccaggcctttgcacatgaagttcctctttgccaagatcactcccaccctatccctactttctggttcagagagcagtgagctccttgtcaccatacagatctctgttgacatactttcttcacagcaagggcgctataacgaagcctgtctttgcccacactcttcagccctgtttcattttttcatggcacttggacaatcataattgtgctatgtattatatgagtttcccttcctgtttttggtcagccttcctcattagagtgtaagctccacttacactctaatgtaaaaaaagtaatttttgtacttttttttttttagtagagatggggtttaatcccgttggccaggttagtctcgaactcctgacctcaaatgatctgctcgctttggcctcccaaagtgctgggatcacaggggtgagccaccatgcctagccaagatcaacctttgaaccacaccagtctgggggcttattccagctctgccccttaccggcactgccacctcatcctcaccaagcctcaattttctcgtctatacaataggttttttgatgatcaataagagaatccatacatgtagaatcctctatgcagtattatccaatagaaagagaatgcaaaccacatgtgtgcttttaactttcctaatagccacactcaaaacataaaaagaaacaggtggaactaattttattataatttatttggctcaaaagattatcatttcaacatgtaatcaatataaaaatcagatattttacatttttttggtactaggtcttcaaaatctggtgtgtatattttacactgacagcacatctcaattcagaccagcacacttcaaatgctcaagagccacgtgtggctagtagctgccgtatcagctcagttctagtagctgctgtattagctcagttctagcataaggctgggcccataagaaatatgacacaactatggatcacttctggctgctcttaacatgggtactagagagaagaagagattctgggttttggagagagatttcaaacatggaaccccctgagctgaaagccacctggtgatgagagtctgctccttcaggtcggttctgaaaactctgagggctgcttgctcacggtctgcatgaaaaccacaaagaaaagcaaataatagcccagcatccctcaggcagagcctctcccacaagatttaaatttaaataatgtctactatgagttacactgagggagttccaaatttcccaaaccattgctacttaaatgtcatgtcccctgctcataactctctctctctctcttttttactttttttcttttttttttgagatggagtcttgctctatcgcccaggccggagtgcagtggtgccatcttggctcactgcagtctccgcctcccaggttcaagcaattctcttgcctcagcctcccaagtagctgggattacaggcatccggccaccatgcccagctaatttctgtatttttagtagagatggggtccgccatgttggccaggctgatcttgaactgctgacctcaagtgatcggcccacctcggccatccaaagtgctgggattccaggtgtgaaccatcgcgcccagccgcctgctcataactttcaacggctgcttattttctgttgggttaacgctgaactcctggggcttctaagctcttccggagcctgaatccatctcagttcatccagtccagtcttcccattgctctgttgtagttaaggcagccacaggccaggcctgtggattgtcaggggggaaaaagaggtggagaatggtgctgagaccaagggcttgggagagcgtgggtggagtcaggctggctgagatcacagacatcacagtgaacatgttacagtcattacatctcatggggcgtgctcatccgtgctaactcagtaggtctttgccacagctccacaacataatgtagtggacgtctcccgtttaacctgcccttgcatccctttcccatttctggtaagagcaccccaaactctgacttggagggtctacccctctgtgctctatcaatgtggttctggtggtaccaacgacaatgtggcactcttcactctgtgccacagggaggcctgtgacccaggccaggccaaacctaatgccctattcttttggttacagtgattagacccaggaactagacatgtgtcatgagtctggccaatcagagccttccctgggatctctaaatactgatgtgagctgattacgctatgaagatacacaaatggagctcgttttcatctggtctgaaggcatgtgggagaaacccttctgcaggaagagagcatgaggccaacttgcaagagaagcagaggtgaaagagaaggaaatgggagagagaggaaatgatatagcctttgagctgctagatccagctgtgcctgaagccagcccccttttttttttctttcctttcgtggatctgcttggcatcttttacttaagccagtttgagttggagttccagcacatgcaaccaaaatagttctgacgaacataagtcaagattagcccctctgttgcatgaatgaaaagactaaggccaaaaaaagctaaataattgctccaggccccctagaatgcagagccaggatttgagtcctcatccttggacttctcatcctatgctctttccacaacatcccccactgtgcttaatgtctgcattagtttcccatggctgctatggcaaattgccacagacatgatggcttaaaacaatataaatgtatttcacagatctggaagccagaatcagaaacaatgaataacacactgaaccaaaccacagggtatcagtagagccgtcctccctctgcaggctctacaggaggatctgtgtcttcgtcttccagcacctggtggctgccagcattcctcagcttgtggctgaatccatccagtctgcctctgtcattacttgtcctcccctctatgtgcatcaaatctctgtctgtctcttatgaggacacttgtgatggcctttagggcccaccttgataagcctagattatccccttatctcaaaaagattcttaacttaatcacatctgcaaagagcctttttctccaaagtcacattcacaggttctagggattaggacccaatatctttaggtggccactatttagcctaatagagcatctgagctctcaggatttagtgtttaaacatccatgaatcagccctgaacaaaaccttcaggacccaatagtccagtctccccagcccagtggttagttcccagcctcctctttcttctccgttcagatgccagcacaagactgagcacaggagtcaatcctgactcagcctctcctcccctaggcaggagtaaaccaagggtatttcacccttttaaaaaaatggacccctttctccttcctaaaggcaacgcctgctgttcaccctgcttaaatctgcagcttctggttgtaagaaacagagccaccatggctatctcacataacagggatatgttataaagctactttgcacattgttggggttcagggggtctgactgcctggattcgaatcccagctctgccattttttggctgtgacttttgaacaggtcatttaactgctgggagcctggagcctctgcttccctgaagatggggatgctggtcttacctcagggctgggtgactgtgagggttaaatgggagtgcatgcgttcccggaggagcctggcagtgttattactgttactgtcacagggaatctgcatttttttttcctttgctataaactgactttctcaggttataaatgttagatactattatttctaccaaatagaatctgagggttatgacttccttgggccccttacagtgtgtaagtcctcagaaccccaagtggtaccctgcctctatgggccagggctcctgaccggccccagggcatccttccacgcccacctccatcccgcaggcccttctgggcttcccaccctgggggcattggttggcacaacccactgcatctcagcgccccaccctggtccaatcagcacatcccatcacttcccagcacaaggccctggtccaatcagcgatgggcagttggacagcatgggcggggctgggggtagcgttgggtgcctgtaagacccaggtgcaagacttggtctggccccaggacaggtcctgggggcgggcagtgtgggcagcccaaggccacggcatctctcggctttgcttccccgagagcctgtctccacctcctccactttattctcactcttctccatgcaccgggttcacagcctccctccagccccctatgaagcctcccagtatttattcaccccatcgtgaccttcccttttggacgatccaagtccttatctccagtgggatacataagactttgcaaattcttccctaatcatgggctcccatagtgtttctattttcctcgttggaaacaacaataacaataatgatcctaaaagcagcgaacggtgctgggctgtggtagttgccaggcagtggctaagtgcctttatgtgtattgactcgtttcattgcacacacgtccatgcatgtggagtgtaggagctttattttattgctaatgaagctgcggaatctgctaagtctcagggccaacagacagaccttccgccaaggttagttccattcttttgctaagtgaattccaaataaataaacgtgaatgctaaaaccatactgccctatagcattactttaaaaataaaacaactaatgattttttttctgattacaaagtaaaatctgttcatatggaaaatttgagaaaaaaaaaaccatactaagcaaaaataaaaatcacccacataaatattttggttatggctgtttccaaactatctgtctatctgcttctatctactttttaggggattacatttaagccatgacttatttatttatttatttttgagactgagttttgctcttgttgcccaggctggagtgcaatggcgcgatcttggctcacctcaacctccgcctcccaggttcaagcgattctcctgcctcagcctcccaagtagcttggattacaggcatgcgccaccacacctggctaattttgtattttcagtagagacggggtttttccatgttggtcagtttggtcttgaacccccgacctcaggtggatccgtctgccttggcctcccaaagtgctgggattacaggcgtgagccactgcgcccggcctacggcatgactttttaacattttccaagtctctagggttctctgattggatatttatgttgtatcctatttttctgctattgtaatacctgaaaatattcttaaacctgtatttctgcctgcttttctgatcaatcatttccttaggataagaagtgtgtatttctttcttttttttttttttttttgagacaaggtctcgctctgctacccaggctggagtgtagtggtgcaatcatagctcactgcagcctccacctcctgggctgaagccatcctcccacctcagcctctcgagtagctaggaccacaggtgtgcaccaccatgcccagctaattaaaaaaatttttttttttttgtagagacaggatcttcctaggctggtcttgcattccctgggctcaagagatctgcccgcctcagcctcctaaagtgctgggattacaggcgtgagccaccatgtctggcctggggatgtatttgtttcaagcttcagatgcacattcccaggtgcccctgaacggctgcagccattgccacccctccgcagtgtcggaaggaccccgctcacctcctcagcagctcaggggttattttggttttgttttttaaatctttgccagtgttttcctttgcattcttaaattcctgatgccatgaatttatttcatttttctatatggaatttactggccatttgggcttcctttcctcttctttacagcacagattttacacattttctccccagccttggcattttcttttttttaaaccttatttccccttccccttgatctattatctatttaaaacatgatgctggttatgtggttatgagtcccttctgctttaaaggttggataaatggatgtacggcatcagctcaacagctgaattagttttcaggtcatcccacccagctgtgctagtcttttttttttttttttttcttaagacagggtctcactcccatggcccaggctggagtgcagtggcatgatcacagctcactgcagcctcaacctccctgggctcaagtgatcctcccacctgagcatcctgagtagctgggactgaaagtatgtgtcaccacgcccggctaacttttgtatctttgtagagacgaggtttcaccatgttgctcaggcaggtcttgaactcctgggctcaagcgattctgcccacctcagcctcccaaagtgctgggattacaggtgtgagccacagtgcccagcctagctattctattcttgccactggaaaaccctcacagaagaagtgtgggaggccacatcggagaagaggaggttatgctaaagtgtccagaaaaatggtgcctacataaaataattcaggatctctaaaaatcactattcacttgccatcccatagggttgtgaagatgaaatgatgtaacgtatatgaaaacagaacattctctgctcagttctttggagggtagaagtatttagacaaagcacttcagagtttataaacatttatcaagagcattttgcagctcaccccaaggctctctggtagatgccatctcatctgaaattgtcaatgctttgctggatcaaagaagttacatgaaaggggacttaaaatgaaaggaacagcccacaggagcttcctgttcagtacctgacattggaaaggttttatcccagcggatcataaccaccttgcaaagcagatagaaccactcttcaatagatggcatttattgcttattacgtgcctactgtgtgctaggctcagttcgaagtccctggggatggaacaaggagggaggaagacagacaagccgcctgccctcacagggctttaggttccaggggtacaattccaaggagatgttatcctcttttgatggatggaagtctcagggatggtcagtcacctgccatggccatccaggactagaatgcagatgtccctaacctcaaagcccctcaccatcctggggtcccaattctctactacatcgaagcagccggtacctcacatgtgtattctcatctccattcagaaagctcctaactacatttcctggaggtgccctgtgtccaaaggtgcactttgtctgatcaggcccatagataggggcctgtcatggaaagtggcaaaaccaaaaccatccagagcgatttaacccttcatcgcccatttgctgctgtcatggggcaggaggacaggagctgtttcagacccaagacttttctggggattttagatggaggagtcctaatccctgtttactctgtctctatattggcaagtgtttccctgggcttaaaagggcagagaggggaggctcttgttctaacagcaatgaagccatcttgccactggtaagaaataaaatgatgagaagattgctgggcctcaagtctgtcacccacaccccacttctctgggccactcagacactgtcctcctggagccagtccaggaccctcctcttctctactggggacaaaatgggaataataatactaataatggtaaagaaatgaagcatttgctttcttttcaaagctctcccaagggttcagctgggctttctggccaattctcccaaggctttagaaaataggtttgagtttgctgagggctctgcatccacctgttgaagaaggctgagggagtaactgaatttcgggttgctctcaagacagtgcacagaaacaagaggtccaaactctcacctccaaggtaaacccttctgattttaaaggtttgtgggaatgccagcatcactgagcagccccaatcctcaaagaacactcgataatgatttatggttgtggctttaccaaccaggcacggcaggagtgagaatattcatgctgatgcttattcgtgatctgcgctaggtgaattacaggcatggtcaggtgtcagcccagagacaggcccactgtggagtaggtgacacatgccgaggccctcttatttgcccagaggtgcacagttaagtagtgaaggcagaatccaaatgcagatccatctgctccactgtcctgggtctgttttgtttgtttgtttgtttgtttgtttgttttttgaaacggagtcttgctctgtcacccaggctgaagtgcagtagtacgatctcagcttactgcaaccttcgcctcccaggttcaagctattctcccacctcagcctcccgagtagctgagattataggcacgtgacaccatacctggctaattttttcagagatggggtttcaccatgttggccaggctggtcttgaactcctgacctcaggagatctgcctgccttggcctcccaacatactgggattataggcatgagccactgtacctgtcctggatctgtttttaaagcaaaacctggcgtctcccaccttcagctggccgctggagcacttcagactccatctggggagcggagtgccttccaggcactttccctctgccccaggctggcagcacagggtcccactcgccatttggggccccagaaggcagaggggcccggggtgagtctgagtctgctccctttgcagtgaaggcagactccagggagctggcctttcaaatgcagaaaacaattgtcctgccttccaagcaaatgacaggggctcattttggaatcttccagttgctcctttccccacttcagatctgggactgctttttccagcctctgcagaaggcaggcctagcaggcaccctcaaacagacttctaagtgggactttcagtgccaggcgaggtgtcacccaggaccccccacccataggctgagggaaagaacagtgccagatgacaccatacctgccacctgcatcccctcccgggtgtgaccctgggcaagttacatggcttcccctgcagtctcagcactgtcttccttactggctggtgaggagggtcccatggaaactggctcctggcaaatgctccgctaaacagaaaacgggagataggcgtgggggtgggggcacaggtgccaacgtggtgccttcaatttgcttcccccctccattttgggcttttcttggtttgttagtgactaatgggacttgggcaaactctcaggcgcatccaaaggagaagccgtacttggaaatcagactctatccccttgagtcagatgaggatgagagacttgatctcatttctgccaaggccacagggctggatcctgagaactcagcatgacttggacctcccgaggcctctgggtgagtgatagggctctggaatctgaagtcccaaagctcagtgggcagaatggccttggccctgaagctcagtgttttccctccttttctctccaaggatcaaaagccagtgactttcaaacccgaccagatcccaggtgtccttggagatttctcaggactgcccccgggatggaaaagcctccttccaccttttgtggcctcagtttccatgtccttgagatttcagcagggacagcgccaggatccttaactaggagacacgttgtagacatacctagggggaggcctgggcatccgtcttaaagctgcatttatttgcaaaataagctcagtgtttttatttgtaggataagctaagtagattatgtaaaatctccacgtctcccatccatattgccagtgttgtgtggttctgggtatgattgcaccctgaaaaaaagtgttctatgccgaggaatgaaaattaaaacccacaaatctaacctctcgagtgcacgcacgcacggtagtcacttagcgcctcccatgagccagagctttcatttcccatccaactctggaagtgctgcttttcttgttatccccacttgcagatgcagaaacggaagctctgagggatggcctcgcccagcacacacctttgcagaatttgctttcaaagccaggtctctactaccatctccagcacgctgctgagcctctatgtgcattagaaagtaaaatcacagatgaatttctcagccatctcaacgcgccccatctcaacgcgccccatctcacattcattatcatttgctttgaaggatttttttctttttgaacagaaggggcacctggctttcctactctgatttgcagatgtgtgttgaaggaatggagagagtagattttgcagttattccctctgggccctccgaccttcttggagacctgtcatgcagggttagcaaagccatttcaacacactactgtggtgtggacaaccaacacagactttgctgccccggaacagctccccactgccacctccaccccaattctctagcttttaaagcctttcacttggcaggaaaacgctgcccccttctggcttaaatggacaggcacgtccagggcaaggattcagattcctgtgaacgtcattcaatgtgaataataggcgcactgaagaccaaaggataaatcggggtaaacggggcagggcaagacaatgccgctgggcggagatgaagattttgcgataccctcttcacttaacgagattcatgcagtcccttcggggcaacaatagcattgccaccagttgcacaacccaagatgttgctgacagactgtcctctgtggaagaggttataaaagcatctatgatttcagaaggggcaataactccaataactaacacagtctccaggggtgactctcaagccgtgaaagtcaggacagcggcaggaagccccacaccgccagcagggatccttggctgccagtggaagctgggcttggctttgtgtgggttctgcgctccttcgcccagtttcaaaacctcccgcacctgtgtctttctccatgcaaatgagcccaacaggaaaaacaggcgcctgtggaggtttcacaacaacctagaagctgtcccatgccagatctctgtcggtgagaaaatgtgtgtggatgctgacttctagaagactccaaagcgcttgtcttccccactccccatttccaaaggctgagactcctctgcactccgagtttcctcccacgcttcgtctgaagagtgggttttggggagtgaaggatagaaaatatctgaagactcttccctatgacttaagacatgaattttcttctcaagtcttgaactaaagtcagaaagtgtttgcaagaaatgttcttctaggtcccacatccacgggaccagatgatgcctgggtgagcatgttttttatgtatttatttatttttgagatggagtctctctctgtcaccaggctgcagtgcagtggcgtgaccttggctcactgcaacctccacctcccaggttcaagtgattctcctgcctcagcctcccaagtagctgggactataggcgcctgccaccacgctcagctaatttttgtatttttagtagagacggggtttcaccacattggccaggatcatcttgatctcttgacctcatgatctgcctgcctcggcctcccaaagtgctgggattacaggcatcagccaccacacccagctgggtgagcatgttaaagatcccacagggaaggagcatgagggtcagatggggggaacatggggaccagttggagatggaaaatgaggggtcagatggggaaggaacaggaggaggttaaatggaagaggaacatgaaggttcagatggaggaggaatatggagacacagatggggaggaatgtgggggtcagatgagggaggaacaggagatcagataggggaggaacgggaggaagtcagatggagaaggagcatagagggtcagatggggaggaacagaggtcagatgagggaggaacatgggcatcagatggggaaggaacaggaggaggtcagatgggggagagcatggaggctcagatgagggaggagcatggagggtcagatgggagaggaacaggaggaggtcagatggaggaggagtatggaggctcagatcggggagaagcatggagggtcagatggggtaagaacagaggaggtcagatggaggaggaacttgggaatcagataggggaggaacaggaggaggtcagatgtgggaggagcatgggggtcagataagggaggagcacggaggggcagacaagtctgctcttctggcctagcttgggctccagagactggcatccccccgggcgggttggcctagtgtgtgtctctgctctccttgttctttgtagcctgtttttgtcccaccagcctgtgagcaccgtgtgactgggacccgcctcccacatgagtgtatccccagcaccaagccagggcctggcacacagcagagcccagcacgtctttgttgcacgagtgtgggaaagtggccagcatccaggagaggaagggcctggcatgttcagccccttcccctaactgggtcttgatcactatcctgtaaaaggagggaaatggccacggttttctcggccatcggctggctggactgtgcattctctggggtgccgtaaagtcctgttctggggcattgccctgcatgatcagcctccatcattttcctccctgaagtgggaggcaaatgccagcccccagagggcaggaacccagcacttcctgagcgacatgtggagccccagaccccagctcattccgtcccccatgacaggtgtgtggacactgtggggctcctgtgtcttcacaggagtgattatccagtgaccagatccccaccaggggtaagcagggaaactgaggcctacagcccagagattctggactacccaggcctttgtcatggaaatcacccattgtgccccttttgtgtgctgggcacagtgctggacccagagctcactagagtgagccgagcccctgtgcctgtcggcctgccttacagtccggtgggggagacagagattaaaggaatatttgtacaaataattcatcccagcggttgaaagttctcctgaaggagaatgacaggggaccctttgggaatggaaaggtcaagattggtgggagatgacagcatcacaaaaagggaagagcatgctctggtgggggaacagcttgtacaaaggccccaaggcagttcttggggaagcgcaggtgcagctggcaccatctgttcctttttcctcctaccaagagctcaagggtgatgcctgaggtagcttcagccatctcccagccatgaatgaaagaccaagggaacctgtggcactagcactattgaactgctgaattccctgcagccacctaggtccaagttcccatcatgtaagaagcagtgatttttcttttacttgcagctcaatgcattcctatctgaagtggggcagagaggctggcagccttctttactaaccaggcctgggatgaggtcaggggacactgctccgtcacaaggtgggttcaactcaagtgaaaaggtacccattcccatcatcaccctgccactagtgggagcccctctgtccctctctgaaaaccccttactgccactggagttggtctaatccttggaggaaatgtcaccccttaggaaatgcccagctcagtcctctggatgacctcccacatcccaggaacaacgaaggtcatgttatccagatccctcacagggtccaagtgcaccccctctggctttgcagctcctccctccctctgctctacagaccagcgacccatcctggtgaggtcaccgagttgtcctgtgtggagtccggctcttgtttccaatggggaaaacagctttcctcagaaagttctactccctctggggaaaacgactgagaggctcttggcagggctattcccagtttcctcactaattactctgggatattccctcctgaatgaagaaacttctataatttgggttataaaagatctctttgaattttctccagagtctgctgtgattataacaataaaatatacgacacacatgaagactttcatcccagcagccccaggctcactgcaaacgagtcataattatgcatctcaacagcaccccccattctctcccaatgtggaaactgaggcaaaaggaggtcaaggctatggctcctcagccaccaagagacccacagatctgctgtgacttccctgtgcccagaattccagccttgcggggaagccgtgggaagttcactcaggccatctcaaatcccaaatgtccaccaccttgaacacccatctttggacagtgggaaagctgtgatccagctccatctggatcctttagttaccctaaaccttgagcggccatggagtcccgacttctgacctatgagattacacaaaaacaatacaaaacagcaaaacacatgatagaacagtgaaacgcgaatgctgcgttgcttgggtaacccacgtgtccgtctcaccaggttgtgagctctcccaggcagggaccacgtcgccatatcagggtcagtgcacgggcacaggatgccacctgccgtgagcacctgctgtgtgtttgatactattccacaccataaggatccagagatttccaccggggactttgccaagctgttatctcccctcatgactgagtgtagaacagagtcccaggctgggcgcagtggctcgcgcctgtaatcccagcactttgggaggccaaggtgtgaggagcacttcagctgaggagtaagagatcagcctgggtaacatagtggggctccatctctacaaaacacaaaaagatatactttagccaggcgtgtggtgtatgcctgtagttccagctacttggaaggctgaagcgggaggatcccaggatcccttcagctcaggagttggaggctgcagtgagctgtgaggccactccagcctgggggacagaacaagaccctgtgtaaagtggcagtcctctacccatgtgtgagcgtgatcacttccacaaatgaacactgaggaggtctcttctgtgccaggttctgtgctgggccttgggatataagcagcatggccctcccttgtggggcgcgtggggagaaggatgttaaataatctaaaaaaggggcctaaaactcaatctttgaaggtgagctgcagggtggtgtggtctctttgatctctcaggggagccagggagggtgtctgtcgaacggtgactgtggaggtcagatcagatgcatcagcaggaggtagcaagacagaggtgggagggagggctgagtggttgaggcagtgcacacagttgtgcaagggcccgggggcaggaggaaatttggtgtgacagaaggactgaaggcagtgtggctggacagttgggctgtccagagcattgggaccatgctaaagattttattcttgatcctaggagcaatgggaatctatcaaatcattttaagcaggagccagatttgactctatgcacatttttgtttgtgtttgtttgtttgttttgagatggagtccggctctgtcgcgcaggctggagtgcagtggcgcgatctcggctcactgcaacctccatctcctgggttcaagcaattctcctgcctcagcctcccaagtagctgggattacaggtgcatgccaccatgcccagctaatttttcgtatttttagtagagatggggtttcactgtgtgagccaggatggtctccatctcctgacctcgtgatccgcccacctcggcctcccaaagtgctggaattacagacgtgagccaccgtgcccagccatctctatgcacattttaagacatgtctgcaaatattttctgtaaagggccagatagtaaatctttcaggcttgggggagcatagggtggaaatggctcaactctgcccacagagtgcagaagcaactgtagacaataagcaaagaatgaagaagtgcagctgcctgtagcaagcaggaggcccacaaaagggatatcgattattactgaggacatgactgcaagttatgattcactcactcctgcattcacccattcaacagatacattaagtacctgctacaggtgaagcattcttaatctgaaaatctgaaatgctccaaagctcaaaactttttgagtgttgacaccatgctcaaaggaaacactctttggagcatttgggatttcagagtttgtgtgtgtgcgtgtgtgtgtgtgtgtgtttaatttcattttttaaactagagacagggtcctactgtattgcccaggctgtctcaaacttccggcctcgagtgactctcccacctcagcctctcaaagcgctgagattacaggcataagccactgcacctggccgggatctcagatttggggattacgcatgctcaactggtaagtatattataaatatccaaaatctgaaaaacacccaaactccaaaacccttctgatggcaaacatctctggtgattgataatcagcctgtgtgtatgtgccaggcactgtcctccgcagtggggaaaccgcagagaacgaaacacttcccatctgagtgaagcttgtgctgtcgtgagagaggcagatgataaaccatgaataggtaacatagtgtcagggagagatgaatgctaggaagaagaaaaataggaaaggaatgggaagtgatgggggtctcctttaaataggaggggcagggaaagtctgaggaggtgacactgagctaggacctgaatgcagacaattgggcgggggagccttcttagcagcaaagagcacatacaaaaggctggaggcaggattgtgctttgggtgttgagggagccagcggtgagagatgcaatctccaagcctgtggctataagatgtaaacttgagaagtgtacagagacacactgttaaactacacacaccatgaagaacaacatttcacccagcaggattaagctatttccatttgtgcgttcagtagatgtattgaacctacctgtgacccaacccgatcccctctggcctccaaagatttgggccagtaaagacaaagacctggccgacctgtgtagactgaagaatcccagcctccggctcagtgtccacaggccaggcttagggaagagtttgtgtgtgaagtgacagaccataggactgagccacaatctaggctcggagtctttgaagctaatgaccaagctaatgatacacaaacccgggagttgaagaggacccccgaccaaaactctaaattagcctaacctcaaactgtgtcaaactcagccaaaaaaatgttatgagcttggtttgttgtttcctcccaccctctctgcctccttcccttccctaaaatacaggatgggtaggaaagaatcttgctttgcaagaaataacaaacacaatcacgatgtttatgaagacttgacgtgtgctaagtggtttacactgtcagaaaggaattatgaaatagacagaaaaagattactaaatctctaacattctctttagttatctgattctataagagccgttgcttttcattgtctttattgatagtaatacagatgctttcttttttttcttttctttctttctttttttttttttttttttgagatagtctcatcctgttgcccaggctggagtgtagtgttgcaatctcagctcactgcaacctccacctcccaggttcaaacaattctcctgcctcagcctcccaagtagctgggattacaggtgtgcaccatcgtgcctggctaattcttgtattcttagtaaaggcagggtttcaccatgacggccaggctggtgtcgaactcctgacctcaggtgattgacccgcctcagcctcccaaagtgctgggattccaggcctgagccaccgcgccggccagatgatttcatctgtagaaatgcaaatgttttgtccctggaaacactatttttgctctgtgactattaactagttctgcatctattggtaaattcatttcagcatttctgattgcctatctatgtgtgtgtttgaattatcctttgaactatttgtaacatcttactgagtgcctggttaattttaagagttaagtaaaaatctttgttttagatttatagaagagtcatgattttgtctttaaaaatatgctttaataacatgcataatcttatttccaaccctgtgaggtggctatcattaccatcatccccattttacagacttacagaggaaaatcgaggcctaggtgtcatgaaatttgcccaaggccgtccacaggtcattgcttgagccaagctttgcacccaggcaatttgaacccagagctgaatctgttcaccactataccacgtggttcctgttgtgtagcctttcatcactgtatggtgtgacaggctcacccccaactgggctgctgcatttcaagttggtgaccttgatgttggcccttcaggattccccagtgttcagtgcctttgtagttgtccagtgtggccagctccactgggaaccccacggagaaggcgtgaggccttttcctccactgtgttcttctctgaatgcctactgcagagctctgacctgtgtgggtgcagccaggttcttactgatggggaatgggaagccaattgatagaggccttaaaacctccagcttggccacatgctggggctcatgcctgtaatcccaacactttgggaggccaaggcaggaggatcacttgagcctaggagtttgagaccagcccgggcaacttggcaaaaccctgtctctacaaaaaacacaaaaattagctgggagtggtggtgtgcacctgtagtcccagctacttggggggctgagggggtggattgttggagcccaggaggtcgaatctgcagtgagccatgattgcaccagtgcacgtcagcctgggcaacagagcgagacccctgtctcccaccaaaaaacccacctccagctcagagtctgtacttgttcctcaatgacactgaggtctactgcttttatttgtttaacagaataaatgcaaagcaatagtatgattgctatcacaagaatgtcaaattctttaaggtagcaaagaacaactataacctgagaatgttactagctgatagatggattggcttttaaaaacacccagaaactattgaaccacagatattatctgaagggagaatgaacaaattaatgtttcatttagttgctgttcctgtatgaaattctaaccacagctcaatggagtcagaaccccaatattgctgtggtgtgttttgtgagcagtatttgtatttgcatgctgtggtattgccagctaacagttactaagcactttgcatccagatcctttgtaaatattttatatacatgttctcatttaatctttaagtgactctatggtgtaagttctattattagctttgttttatggatgaagtgactgaggtccagagacatagccacttgccaaaggccccaaatctgctaagtggagctgccaatcaaactcccctgcacatacataattcacactcattctagaagaagaggaaagctcagagagggagtcaaaactccatttctagtatttccttccaacagggaaccctgtcctccctctgaaggtagcactctcactttaatttctaaaataacttttgtttcccagcttcctgatggagtagccaaccttgcagatggccctcgatgatcggcagtacctggtcttcatgtgcttgtgttgttcctcaatattgtccctcaaatgttgaatcaggactacagtggaaattataatgtgacttctgaggccaggtcataaaaggcattgctgcttctgccctggcctcttggattgcttgctctgtgagaagctagctgccatgttgtgaggacactcaagcagctctgtggagaggcccatatggagaggaactgaaggctgggcaacagccacaccaactggccagccaaggaaatgaactatcttggaagtgggtccctagctccagccagatgcatgtagcccagctaaaaactgaatgcacccttagagctcccaaaacagaacattccatccaaggtgctctcaaattcttgaaccagagaaactagaagagataacaattatttttcttttaagttcctaagtgttggggtaacttgttatgcagcaaagcataactaataaatatttagttcctagaagcaagatgctgctgtaacaaaaatctaaaaatatgagagtggttttgggaccaagagtgggaaaaagttgtagagaccatgaagagagtgtgagggaaagcctaaatggtcttaaagagactgttttcagaaatatgatggccttcaaggaggctattggtaagatcttgaagaaaattgaggaacatgttactggaagctggaagaaaggggattcttacccatggaacagcagaacatctagcacattttgttaacatggaaaatagaaaatgtacctactgaactgggtgatccagctaaaaagatttccaggcagagtggtataggtgccaccttgattttcgttgctactttgagtaaaaatcagaggaaagataagctaaagaagaaaaaaacctatttattacaaaagaggcagaaactgcagggtttgaaaatgcccagtctgtcaaggtaacagacaatgtgaaaattttaaaaacattttgagacaaagataaaatccaaagtacagccagaaaaacagagcgtaaagatgaaactaaggtgtggctgcaaggttttcttgtttagacctcagaactatgcaaggtgtagtctttcagccacttcatagcatcctaaagtagaaaagagatttgcgggtgtagcttttgtctaacagagtgaatgtcaataagattcataggacacttgcaaaaattttaagagaatttcactagcaaaaacattgccagctttgactgaatagaaaagaaacactacaagatgaactgaagacttctattggcaaataaactactcaactgcaaaaacacgtttacttttatgaaaaagaaaagataattcagggattagaagcaagaacccagaagacagagccaagagctgtaaagaatcattttcagcagtaacaggactgagtcctggccaaggaacttgcataatgttcctggctagacttcaaaatttatcaataatagacaatcagtgtacctagtaactacctgaagcacacagagaaatcaaaaaggattcattagagaaggaaaacttgccaagcaggtaggaatctgatttacaattgctttttttaaaaaaagacacctatggtggagctttcttgactaattttcttccttgcattattcttgatacacagagaagccaaaccagtgattcatccatgactcagtcataaataaagtggcaagtgggatgctgactgactttggcacctgaattctaaggtgctacagaagtgtggatttttatcaacaaactaacacagagttgaggttttcaactccactactatgagccctgggacttccaaagagatgtctctcggtctttcttggggaggagtaaaggtgagggttgctttctccttcaattcagcttgaaacaactctgctttttgttcaaaaatttatacacacatatgtgtagtctttgtacatgaaaatgtaaagaagaaaataaaattggtacagattaagcccaagacaactcctactttcattaatataattgcacgaggttagcatggtaggtgttctgatgaatatgctccacctccattccaccctccctctagcatccctgcttgtaaggcagaggctataaagatgaaaatcatatttcctggactcttttgcagctagatttctggatgtgaattagattctgctaaatggatgtacctgtgtggaatttggaaggtgaggcaggtgccattgtcctgccccttttggatgtgagagatggggtttactgcagctgcaaccccctgtgcattttccagcttgttcattgttgagaagcaggtacggtcatgtgctctcgaactctgtggttctattggcaacctcagagtttgtagccccatgcaaggccagttctgcatgctatgggagtctttcttggaagaacacattggattccagtccccaaagctcccagtggtcttgcaagcaccgtgtttcttacattaaaccctggaatgttttctatttcttgctttgaaacttgactgatatgattaaataattaaacattacagaaataaacaaaaagtaaaagcttccctccctatcccaattccaatttttctttgtaacatatttattatttcagaaaacttttctttgaaaacctctttatagataagtgcatatattgttaaaatatgttgttatatatgtaaaatacatatatgtattatattatgtaatattactcaaaaaagtcataatatagctatggtcttgcatattgattttttaaattacaaatctttttgaacctcaatgagaacccctcaccagaatgactaaaaaaagaaaaaacctgacactagtaagtgttgacaaggaccgggagcaataagaactctcatacattgctggtgtgagaattgtaaattagttggaccactttgtaaaactgattggcagttttcattaaagttaaatatacacctatccactgcctcagcagcttgtccacaaaaagactcatacaagaatgttcagagcagctttactatattagtcaaaaagtagaaacaacccaaatgtcccatatgtaaatgaataacaaattgtgttataacctataatagaatgttacatagcaatgaaaaggaacaaagcactcatgtatacataacatggatgaatttcaagaacattatgctaagtgaaagaagccaagtataagagaacgcacaccatgtgattccttttctgtgaagttcaagaacaggcagaactactcaacagcccccaaagtcagaagaatggttcctttgtgtggggagagggcgtgactgattctaaagagcacagggagccctctcaagtgacgggaatgttccatctcgatcttgatggttacacgggtgtagacacatggaaaaattactcaagctgtgtacttaagactagcacactttcctaactaaaaggttatctttttgtatcagcacatttacatctgattccttctgtcgactatctgcagagatttctagtgcacaaagttccatgttttaaccactgccctgtgtatggacttaataggtcgtcttcagcatttttgccatcgcagatgatgctatgatgagcatccctggacatacctcttgtgattccaccgcaagtatccgtagggtaaattcctagaagagaaattggtgggtcagagggaatgtggctcttgatgtttcacagacattgcccaattgctctccaaaaatcttgcagcaaacatgcactcccgtgaacaccacagtcatgagagtgctggtttttcccacactctccccagcactggagattatcaactttcacaatgtttgccgatctgataagtaaaagaaaattatctttttttttttttttaattagaagctgctctatctttatccatttctcatattgggtttctgcatctgattttgtttttttaaaaggaacaaatttgttttattcgttgctaaataaaacaaattaaaatttaagactagaataaaggaaagatcacatttcttgagatttaacagccaaaggaagaacagaatttctctccggtgggtcgtttctgtaacactgaggctgggagaccccgtggacgcccaactcacagctcatggggccaattctggctttgggcacgatgtttcaactttctgtgcctcagtttcttcacccgtgaagcggagggaataacagtgttattattgctgtgacagtcgtttgagctgtgactcatgcagggctcagaccgcgcctggtcttatctctgcttctgccattgccgacatcagcgtgagttgttatagaggcttcccctgtgggcttgagtttctgtttttctaaaatgaggctgcggagtgagatcccttccagctctcccgctctcctgatttcctgtcccgtggccccgtgaagacgttgcttccctgccctgggcactatgtcccagcttcctgaggtcacccagacaccaacgtaccacccaggctgtgctgcctccgccttctcctaaaggcggccacactcagttgcctggccacaaagcgatgaagctttttccagaacctcgggatccctggagagagcatttcccttggcttcagctgcagcccctctttctagatggagtgagctccatcgcgggggtcccccagggggacagataccttcctgttccctctgcccaagggcccacgctcagagcactgcctcccacactgtccctctgcagatcaaccgaggctttgactccaacagagagtggattctaatttagtcttggctgggacccctttcccgcaaaaagatatctgacctgatgtcttgccaagtctctaccctcctcggcttacatcatggaaactgtctcttttacttcatggaattcaagaacactttcttccttctgggtctgaatctgaagccagtcacgaagggaaggcactaatttctctaattgaaaaatcctctcctccagattgtaatggccccggacaaaaggatcagatcatttgaaagacaaatactctctaagtaagtttccacattgttaatatttcttgcctctctggcccccactttcctatttcaaggcctctctctagtcctggttgtgttcgctggagcccagaacctaacctggctttttttcccattaaataatcaattatagactcacatcaggctgggcacagtggctcacacctataatcccagcactttgggaggctgatgtggggcggatcacctgaggtcagcagttcgagacaagcctggccaacataaggaaacctcgtctctaactaaaaatacaaaaattatcctgacatggtcgtgggcacctgtaatcacacctactagggaggctgaggctggagaacagcttgatcccgggaggtggaggttgtagtgagccgagattgcaccactgtactctagcctgggcgacagagcaagactctgtctcaaagataaaaaaaaaaagactcacatcaaagcgaggttgatgaggaggacagcagggaaagacgtgcacttgcttattagttgttcattttgatggctcttttcatcttcactttgagggctgggaaggcacaacatgttaggtttgatggggctattgtcaaataaaatgcaaggcatcgagacgcacactcataaaaagaaaagtgatttccatcggttaacctgaacattgattcacttcatagcttggaagtttgctgtgtcagggtcctgctaatgttgaattctaagcctgcatgcaaaagtttgcaaaaccccttctttttgcatagttcaggcggatatacaggtaggtggatatcaacagcagctgagacatggtgaggatgtaactatgtgtcaggcatgagctaagcatttgactcacatcatctcactgaaacctcacacccaccctggaaagaatgctacttccactaacttcagtctacagaaaaatgagagttagtgaggcttattaataagaagttcaaggtcacacaggaaacctgagcagagccatgactgaggctcggtctgtctgggcctccaacctccctgttccagggcttctagatctctacactattgacatttgaggctggggtaattgtgtgtggggggggcgggggggcgcgtaggggctgttctatgcattgtagatgtttaaaagcatccctggcctctacccacaagatgccagtggcacccgttccccagatgtgacagctaaaaatgtcagacattgccaagtgtccactgggggacaacatgacttctggtcaagaaccagtgtgttcagtcttttcagtgtctctgttctcttcctgccacccacgtgcacgttagggcatgctccttgggaccctctacagactgtggaagctacttgggaggcaaccactcctgtaatcactgagcttctgaaactgaccctccacctgatgggccagggtatctcagttccaagaaacctgctactccgcctgcagtcatcaagaagctactgtgcacgagtggtttccagaagttacagaaatggacgagacatagccttccctcaccaccaagagtggaggttagaatctagtgccccacagccaaatctggcttaggagtgtgttcaccatctttgcaaaagacttatacaaaattgaattaatggccaacacctaaaaatttgaaactttcatattttttaattaaaaaaaatctaaatttctggcttatgtggaaaattggaagatctggctattgtcaagagtgggaaacccctgacaacaccgtcagttgccctgcatttttccatgactccctgtcaccccccatcacccaccccggttacacaaacagctcaggccaactgggcagttcaggatggggccccagagcttgatcagaagctcctggagcgctgatatcaatactagtgatattaacttgtaatccctcctaccaagtctcttcagatggctgaccttaatgcagcaagattcccagaggagggagggattgctatgggctggagactcaaagagggctccctggaggaggtgagctgggcagtaaaagtaggtagtgtttggcaagattgcaattcagagaaggagatgcttcatggtagacgctggatgacagatgagctgttatgtgcagaaaggggccaaagagagagcaggtggccatagggaagaaatgtagttcctgtccccatggggctgccaggctggttcaagaacctcaatgccccaacttccttacctgaagggtggggactaataatggcacccatcacaagtgctgctttgcccccagggagctcctcgatcttaggtgtcatgttcattcagctgaattcctctgttagttgctctataattggtgtctatttttattaatgttgataatacaccaagctcatgtatgtggatcatccaggggctgaaggtaaagaagcacctcttagtagctcacttgtcctaagagaattccagctacaaaaagtgaggagctccttgggcaaggcctggtgcaggcagccttgctacgagggggacagttcctgcccttcagagggaaagtccaactaggaaaagcaaatcaaggggagcactctctccagggacgcccagttgctgaagaattattgttggcccagctcattgtaaatgcaaccacgttagtttttgtgaacatcgcttgttataccagcccaggggctgttgcttccagctggaaagctggccgaggagaaatgggtagtaaagtatttcataaaattggtttgagaattgaggggccagcttcacatcaaggcatgaagagaggcaccgggcctgagcagctgcgtttactgtccggtgtaactggatataagcgtggctgtaaaacagatatttacgagtgagtctgatggagcggtatcaccaggtgcttctgtggcctaatcacataggtgacaaattaaacagcagagttgaagttaagaataaataatgtttaattacaggtcactgctgccctggctgcaaggtgaatcccattcaaattcatggtaggtgaactagagaaaccacacatctgagattctgctttctcctgcttccttcccaccatgctaccactctgggtttcagagctggatgttcagtctggaaaagaagacctccttgttttttgttttgttttgttttgtgttcgtttgtttgtttggagacggagttttgctcttgttgcctaggctggagtgcaatggcacgacctcggctcactgcaacctccacctcctgggttcaagtggttctcctgcctcaccctcctgagtatctgggattataggtgcccgccaccatgcccagctaatttttatatttttagtagagacagggtttcaccaggctggtctcaaactcctgaccttgtgatctgcccgccttggcctcccaaagtgctgggattacaaatgggagtgactgcacccggtttctaacctatgtcttttctgcccaactagactgtacattcttttgtttttttttttgttttgagatggagttttgctcttgttgcccaggctggagtacaatggcttgatctcagctcactgcatcctccacctcccgggttcaagtgattctcctgcctcagcctccccagtagctgggattacaggcacataccaccatgccttgctaatttttgtatttttagtagagacagggtttcaccatgttgcccaggatggtctcgaactcctgacctcaggttatccacctgcctcggcctctcaaagtgctgggattacaggcatgagccaccgcgcctggcccacattctttaagggtagggatccttacttccacccaatgcagcaaaacctcatggatacctataggccgggcatggtggctcacgcctgtaatcccagcactttgggaggccaaggcgggtggatcacgaggtcaggagatcgagaccaccctggctaacacagtgaaaccccatctctactaaaaatacaaaaaaaaaaattatccgggcgaagtggcgggtgcctgtggtcccagctactcaggaggctgaggcaggagaatggcatgaacctgggaggtggagcttgcagtaagccgagatcgcaccactgcactccagcctgggtgacagagcaagactccatctcaaaaaaagaaagaaagaaagaaaacagagatcctgcttcaaaaacctgccagcccagtgaggaagtgtgagctgagccgtgaatgtgtgcaaattcgccaatagagatcccaaatctactttttctcttaaaatatttgctcagcatgcatgacgtatcaggaacagtcataggtggtagggatgcaacagaactgtgaaggttctaagatttttccatactttcagctaataagtgagcctgtcacagtgttgtcaatgcaggaagatgacataagactactgggtcagagataaaggagtttattactacacagcaggcagcatgagatttatgcttgtgtctgtttcctctttacccttaagtcctatgaggggtgacagacagtgacccaggtgcttgctatccacacaaggttttgcatcatagcagaggaaacctgagtttagggaatcccagttttttataagcttctagatcctgcccaccctttgccctagagggaggcattactggtaagcaaacaaactttccctctgttatctctattttccaagactatttgcttacaaacatccttggaaaggtagtctggaatgcccatgctgtcagtgtctctgctcacaagatatactgacattctggaaacccatggaacactgtctcccagcagctaccactttagaagtttgtcagggaggagatcgcaggactcctcctctgccatgtgctggtggtgagccgtttccagttcactgtgcaccaggcactgcacgtggcttgtctcactcctcttcataaccccatgagacagaccattgtcaggcctattgacaggttaggaaattgagactcagagaagctaacttgccctaggccacctctcttgtcagtagcagagccaggacttgaactgaggactgctgactccagagccccatcccatgttctgctctcaacacataacactcatggaacaaaacgagttatttagaaaataccagtcaatgcggttcttggaacctcaccctggtctgtgaccccagaaccaacatgtgcccctgcccctctctgacctccctggcagccagccttcctaaagtgacaggcggtcttctgccctctccacctcctgtggagccagaagcctggtgccctctctcttggtctgtgtccaagtaaggaagagcagccacgtcacggatgctgggcaaacatcagcagcaagggctgcccagactcggggaggaagacccgcttctaagctgctctagtgtagtgtgaatactccataaacttcccagctgtcttccacccacccagggttccctcgccaacaggatccctccacccagggccctgagggaggctcttgggaagtctttgaaagctggaaggagcttttcctgaaagaagaggtttggctagtctggtctcttgtcttttaaactgccctgcaaggacagaaaaagtccttggacttctcattgcaaaatctcaatccaccgcctcctaggttggcaggagttgctgctggggagagggagtgaggcatgctgggaagaatgtggaaggtgaagtccaacaggcctgagttcaaatcccagctttacctttttccagctgtgtgaccttgggcctcagtttccccatctgcaaagtgaggataatgcttgcacctacctcacagagtcactgggaaggtttaatcagattatgcataaggaggcattcattctatctttaaaaaatatttacgaaacacttaatatgtgcaggaacagttctaggtgctaggactacaaccgtgagaaaaacgccttgcaaagctcacattctagaggaggagacagataataccagcacctgcgatgcagtaaatgctcagtgattcttagccacaggcagaaacaggttgcttgggggacccctcttctggttagtggggaggtctcagagaaaggaggtgatcagctagctggagaccccagaaagcatctccgacaagaggaagcatctaaggtcaaagaacagctgggtggctgattggtgacattgacagcattctactttctgaagctataggaagataaatcaactctatgggagctggctctggcctcctccagggggttggaggtagtcacagtagaggggctcctctaaattctcagaaagccattctgggtaactcagcacccatggctgtggcctcctgggagaggcagagatagagtcaagacgtctgctccccggcctgccctttcactcccatctcctccacccttcacaggcgccgctctcagtctgggcccctctgcaacacctggagatgggccagctgtggagcaagcatctgctccttaatccgcccccagggtttggcctgctggaggtgcggcagcacccaagggtgagtggttccggaaaggaagagacagccctttggacacgttcacgagtttgttcatttattcagtgattagacattgtttggagcatctattgcaaaccaggcactgggggtgtggggctgtggggtcgccactagctcggcagaggggggaaaatggtacattttagaatcacaaaaaaatagcttcaaatagtacataataccatctcctcaggtcctgagaccctcaccttgagcccacgtgttccctgccgctggggttcagcaaatggcagcgctttcatcaaggtagaaaagaaaaacaacaaaaaagtcagagcacctcacctgtgccacctggtggcgggatctgtccgcactgcagcccagcagcttgcctcccgccacccaccgccccaggaggctaaccctgcctggtggctctgggactgggtgtgaggaaggctcctgaggcctgtctggcctccaggatctgggtgaagccagagaagcaggctccgaatcaccccagcctttgcaaagccttaggagtcaagttgctgcatatgggaagcctggggctccggtaacagctcagcaaggctgcgacagccccgggccaggactcagggcgaaacaaccctgttgctggctccctggcttgggacaatttctagtttcccgagtctcagcttggtctccgatggggaaagtgtcccttcctctcaaaggtccattagcccagggtgccttgattcagtgaggaggggtctggactagattagggacacagaataaggaaaattcccatatccccattaccaagaactcctactgcaggagagtacagcgtggtgtgacaatcagggactcgggaccaagaggcctgtaaccgactgctatccggcctctacctgtgtggcttgggcaaattgcttcacctcccagggcgtctttatttatgaaagagaataaatgtatcctgattatagtgttgttgcaaggagtaagcaggaggatgtagccaaagcacttaacacagtgtttggcaagaactgttcaataaataaataattactattgttattactattatttcttgagcatttacgttctaggcaccatagcaaatgtatagcaatagtaataaacaacatttgatgaaagctttctttatgccaggccctatgctgagagctttatatttattattttcatcattttgatccccactattctataaggtaggctataattacctccaattttgatgaggaaactgaggcccagagaggttaagtgacttgcccaaggtcacacagccaataaggttcaaaggtgagattagaacacaagtctgtccactccaaatggctgtgggagttaaaatagatattcaaaggtggccacatggtggggggcattgagatctaagggacaaaaatgatgagttcttcagtttaagatgagttactcaggtcgcaatgaacgtgaagatggaagtggccattgtgtccctttagaagcctgggagtatggatcaggaggctgcctgggaggtgatattgcagctgctacaacctcagagaactgggaaaacttggggtgcaggccagagggagcgcagactgaggagctgagctagtctcaggctggcagccacttggggcctccgcaggcaggagagcaaaagtgggagaccaagaagtggggcatgaagctgaagaaagaggaaggctctgtgagggtcccaaagggccttgtcagtgatgccacagagtttagcctttatcctgaaagccacgggaagtcttgcaaggagattaagcagcaagaggatcaggttggcatttagaaaaatcactctctggctgggagcagtggctcacaactgtgatcccggcaatttgagaggccaaggcaggaggatcgcttgagcccaggagtttgagaccatcctgggtaacatagtgagacccgctctccacaaaaaaaaaacaaaaattagccaagtggggtggcagcatatgtctgtagtctcagctacttgagaggctgaggtgggaggatcacctgagcccaggaggtggacattgcagtgagccaagattgtgccagtgtactccaacctggacaatagagcaagaccctgtctcaaaaaaaaaaaaagtagaaaaatcactctggaacctatcacgtaaccaaaagccacctgtaccccaaaaactattgaaaaaataataatttaaaaaaagaaaaatcaccctgtttgcagcgtggaaaatggattcagctgcctccatctagttctccagcctgtcttttaaatatttttcaccacaattaatatacattcactgtaacaaatataaatgggacaggaatatgtaacataaaaaactctcaccctccaattctaatcttcaaaagtaatcactatactataaagcagttttgacacacacagtttcagattttcagctacacatatagacgacatggatacaaatataaaattgtcacctagcaactgttgggagagcctatcatttcgggtgacacccagggtgatgtttcccaaattgcacaccaacccactctggtgacaacggggcccagaccagttgttcttaaccaggcaatccaggggcatttggcaatacctggacacattttcgttgtcacaatgcaggtgcttggcaggagctactggcatctagtggatcaagggtgctctgtgaacatcttatgtattataggatccccacaaccaagtgtcttctggcccagatggcaatagtgccaaggctgataaacccttgggatctttgagggaattccatactggtgagatttgctagttgcaaggaacagaaatgcaatttatttttatggtatcaggcagctcctgaaattatctagaggctgcagagccaggttcatgcagccagggacaatgcccttcatcctgatgtggaactggtcaggtgatggcatggtgcaccgctgcacctgctgagcacagatgctgcactttgccccagactgttctctggactctgcttctggaacccattgtagccattgcagctgccacctccccacagcttcatcggtgctgcccggagctgcagctttgcactggcagctttcactatgtgtttgggatgggtgcttctgattggctgagtctaggtcatgtgttcatgtcctagctgcaagggagtctagtaaaataagtttgcctcatgttgagctcctatagggaatggctctttgccttataacgcagagaactcctcagacatgggatggaggtttggaggaacctgacaaagggccagtctatccagagacaggatgttcagtaacagtacctcaagccacactgaattttactgtgaaccatgtattgtttctctcctgttcaggtcactttctacctcctaggtaatctgtctctgactcttgctcatctctcctggtagcagagacaggcaggtgtcaggcttgggtctagggtcagccacatatctagttaaatacataataacttgttttcatgatttttcctctaataatcatttttaggctttgttttctcctgaactgttctttcttatgagatcttaatgccatggatatattgcatatctctttaggttgtctgtttatctgtgttttatcaataaaaagtgtaagactttcttatccactctccctcatcctccccaaacaatatttgccctccttggggcaattttgccctgctgagactgcatggagagacagaccttatgtttagagtgtctccaactagcctaacatcagacttaacagaggaaccctcctaaaaatacaaatccctggccttgatccagacctattgattcagaaatatcaagagaacaacttgggaatctgcatttttaacaagggcctcaggggattcttatgatcagataagttttagaaatgatcatgtgggccaggagaggtggctcatgcctgtaatccccgcaatttgagaggctgaggtggaaggatcccttgaggccagaagttcaagatcagactggacaacatagtaatacctcatctctaaaacaacgaaaataaattagtggggagtggtggtgtgcacctatagtcccagcaactcaaaagactgagtcaggaggatcgcttgagcgaaggagttggaggcttcagtgacctgtgattgcaccactgcactccatcgtggtgacagagcgagaccctgcttcagtggtggctcaaaaccgtggctgcggactggaatcacccaggaaatttaaaattcgatccatgttctgtcccctcccacagagatcctcaatgaatcagcgagggcatgatgaccctaataggcggtcaggtggttaaggctcggataggctgagtgggtcgggatactggcgttgcagctcaccagctgggtgtccttggggaggtagcttgcagtctctgagcttcaactccttgggcctggaagatgaggtctggtgagcatcagtgagggggtggacatttcgtggtccacacatagtaggttcgaaataaatgggagctccttggctattacaattcagaggctgaacattccagatctgtgtttgcacctgtcttgatctgtcgcctgttggtcttgttaaaatgtggattctgattcagcagatctgggtgagacccaagattctgcatttctaacaagttccaggaaacatcaatgttgccagtctgaagagcaagatgctacctagaccagggtttcttcaccttggcatttgtggcattgtggcctggatacttcttttgtggggctgtcctgcacagtgtagggtgtcgagcagcatccctggcctctactcactggaggccaggaacactcccatccccagtcctaacaaccaaagatgtctgcagccatcgcaaaatgtcccctgaagggaccaaattgcccgcagttgagaaacaccagcccaggacagtgagatgatagtgaaaagaggaagaaataactagtgacccaagtcagctgcctctgtgcgacctgaagcccagagggttgggacgtgtgtgttgctggatgacgacatgaacggaatgaatgagccgatgtagaacgcctgggagacagaggagcccctcatgtggaacctgattgctgcagatcttggagtttggtctcccctggctgcaagagaagagtgtagacgaaacacaaccaaagtgactcactctggagaacaaaccagaccattcacaagcagaaaccagcgcaggttcagttatgtttggtatacccaggagagaagggaggcagtgtcccaattcatgtacagacacgatgtgggtaagtttaccgttgtgtacgttgaggttgcctttgaagggaagcaacccaagacggtaacaccaaacaaacacgcctctgaaccaaggccccggaactgccaatctaaacctcagagggaacctccacacacatgcatatgtgcacacacacgaacgcacactcctatgcgcatgggtggcaaaaagatagcaggtctgagcaggtcgctggaaaacacgggctcccattcatgcgattccctgcatgactgtacatcatgcagtcggcatctctaactgatgctccaaagcattttgttttatctgggattcaaatccatgaccacccaactccagagcacaaacactgtccacaaaccttctgtgcaattctcaaagccatttcactttcatgacaaaacgaccataataatatggctacttttttgcacattctgtctgcgccagtcactgcctaagcattttatagatatcatctccttgaatcctcaccagaacaggacagaaaatgcaccactgtctgcagatgagggcacggagaggttgagcaacgtgcctgaggtcacgcagctcataagtgatgaagctaggaagggaatccaaatgtgtctgattcctgagtccatgcccataataacaacacttctggctcccagctgacccgagaccctcacttcgcaagtgaacagcagccccagagcagcagcctcggcaccacgggagcttgctagaaatgcagaggcccaggtgccctcagacctgctgagcagaaatgcagaggcccaggtgccctcagacctgctgagcagagtctgcaccctggccaggtcacacacacgtcaccgtctggggtttactggtgcagagaacagaatgacacctcgcctccttgcatgttgaaatccctcatcttcatgaattaaagggttctttatatttgttttccaggctgggcaagttggctcatgcctgtaataccagcactttgggaggtcaagacaggaggatcacttgaagccaggagttcgagaccagcctgagcaacaaagcaagactctgtctctccaaaaaaaaaaaaaaaagaaaaaattagcgaggcctggtggaacatgcctgtagtcccagctacttgggaggctgaggtgggaggatcgatcgctcgagcctaggagtttgaggctgcagtgagctatgatcgcatcactgcactccaggctgggtgacagagtaagaccctttctcaaaaataaataaataaatttgttttctaaaaattcattcaagaaatgaatgctcatggggtttacaaacatcagatatggtgcaggaggacttctaacagaaagcaaagtcccgtttccaccctccccaccccacacccaccagggagggtggctcacaaggattggctcttcctgtggtttctaccctgtccctaaaaaatgcactcaaatagctgtgtatcgactacgcaggtccgacaggcgcagttggcgatggatggatatttcgctcaggtacgtaaccactccaaacctcctccctcctgcccgtatattcacgtcactgcttccagaacctctgcgggcagcctttgtaaatgtagacatagaattaaactcgtttcttgctcttccacttttccgcagggcccctgaccattcctgttttgtgagatggaatctggagccccatccctccctccttccttcctctcctgtccactcctgccgtggatctggggatctggagaggcagggccagggtccgtaggctgaactaggtgagcggctaaagtccagagcaaaggcatggagaattgggagctggttttgacccagtcagtcccatcgcctgtctgaacctgatactgaaaccagaagttccaggtcgaagctctggcttgcctatatctccccactggataagacccttttccagcgtgagcctcagtttccctacctataaggtaagacggctgtttttgttgtctggatttcttggagtccatagcaatggctttcagcgtttccagcactgacagtgtgagatctccttggaaaataaagtcacctcagatgccatctcccctcaaagccatggaactcgtctccagccacaactcacagcctggcctctctgtcccctgaggtccactgagacctcttgctcttctatttcttagagccctggcagccaggtagaaacaaatatggctgcttttgttatcaggagggaagccacactgttctcccctagcagggggttggtgtcagagctccgggggaaggatgtgtcatctcagcacttctgagcctattctctccccctgctgcgcccagctctcttcacacggttgggggtggcagagggtcctgagccctcccttccatgcacacctctgcttggctgcaggcgcttgtggagctgaaggaagtgctgccatgcgctgtgcaggtgtgtcacattatcacccaggcccacttcaaggcaaacagatgaaaacgacaacattgtcttcagagccacctgggctgtgggctgcgggcaagcaggagggaagtttctctctaggcaccagcccaagaacaaaagactgctttggacttgaactgttccttagtaagaaaacagtaactggaagctggttaaaatcatcaggagggctttgtgggatgcttcggagattttcttcttcctggttatttaggattaacagtcagcgtagaatctgtgcctgcatccagacacagggacgggaggtttggaggaggggaggaggagaagccatggcgaaggttcatagcttaggagacccgaagccaagggaataggccagaagcagatcctgagaatgccatgtgctcactgccctgcagggctcttattgccctcagagaaaaagccacagtcctggccaaccccgccccccaggactctatacagccctgtcccagttacagccctgacctcctgcccttgctctgttgctctgaccacactgaccccctcgcagttcctctgacgtgccaggcatcctcccgccccagggcctttgcatgcgctgttccctctgcctggaattcttttccccacaatataaatatgtctcactttctcatgtccttcaccatgttatctccttcgagaagtctttcctgaccaccctctgaaagaaaggaactctaggccgggcatggtggctcacgcctgtaatcccagcactttgggaggctgaggtgggcagatcatgaggtcaggagttcgagaccagcctggccaatatggcgaaaccccatctctactaaaaatacaaaaattagctgggtgtggtggcaggtgcctataatcccagctactcaggaggctgaggcaggagaatcatttgatcctgggaggtggaggttgcagtgagccaaaatcgtgccattacactccagcctggcagctgggagacaagagcaagactttgtctcaaaaaaaaaaaggaactctaaccccaccctggcacttcctgtgcccctcatcgcccttgcatccctctacaggattcaccgaccttggacatctcctgtgccgttatttatttgatttttggtgcacattcaagagcttaagagaggggggattgctgtgtgttcagttcacagctgcctccccagctctggaacatctacagaacagacactgggtaaggatttgtcagaggcatggatggaggttaggcaggtagggtgccctgctgtgactggtgtcagcagaagctcaagagctctttaaggctttaggataggctgagcatggccctagaggagtgcactcttggcgccgttcccgttgggtggttagccccggtgctgatgacagcacttcccaccagagccctgtccacacagcatggtggggaccggtcttctctgcaagacctcccctgactccaggcttcatgagggcagggaccaggaccagcttgttcactgaggcaccctcagtacccagagcaagctcacacctggtgacaccaagaatacttgtccattagtgaaatcatttattttcttagtcctcacaatacacccacgagatggggtcgattatgattgtcctggagatggggacactgcagtggtggggcctgcattccaaaccagcacatctctgactccaaagccctaagtgacagccccagggcaatacaatttatcaggatggccacagggctggaactgcattattaaccagcatgggtcctgggcggcttcttaaaaaggaggctcctcctccttcatccattgatctggccagttcaggtccacagtcccttactgagaagctattgataagcatgagctgttaggtgatgctaattgggactgaaaaagaatgccatcctcaaagggcttccagattgatacacatgtggagagagaagctcctggaatctggaggagctgcatccctggcagctgggtgataagcaaagcgccccaggtcagggtggggtgcatcttggctgagcccccagggcagtgaggtaccagcagggaagggaaggagagtgcaggagactcaggcagaccacacacacagcctgagcaggtgcatcctggggctgggatgcccaggctatctgggaaactgagacctttgccttgggtcagagctgccaggaatcctaaggaggaaggaaggtgacgtcgaggtgggttacgaccattaacccatgagggagaatctaatggctggtgtatcagtcagggttcagctggagaggcagaatcagtaggaggcagatatcaagggatttattgcacgcagttggcttaggtgactgtggggtctggccaggcaagtcccgagtccgtggggcaggctgtcaggaacagctgtgactcacaggcataggcccaggtcgctgtcacgggaggaatttctccttatgcagagagcctctgccggctccaaggtctttccactgactggaccaggcccacctgggtcatccaggccaccctcctttatttaaagtcagctgactgcaggctttaatcacatctagaaaacctctccctgcaactctttcaggtagaagccggcctccctccctcacctccttccagcctctctttccagtctcaggcaggtctttcctcactggcttagctaaagcagcacagcacgcccccagccctctcttttcctgctgtatttttatcactgagcacctatcacttcctgacatgatattatgtaacatttgtttatttatttatttatttatttgagatggggtcttgctctgttgccaggctggagtgcagtggtgcgatctcggctcactgcaacctttgtctcccaggttcaagcgattcccctgcctcagtctcctgagtagctgggactacaggcttgcgccaccacgcccagctaattttttgtattttagtagagacggggtttcaccatgttggccaggatggactcgatctcctgaccttgtgatctgcccgacccagcctcccaaagtgctgggattacaggccaccgcgcccggcccattttgtttataaattgactcagatgaaagctcagaaaaagtggggatatgttttgcagctgaagattgtgtctttagagtctagatcctggcagcctgggcagtatagtgagacccccatcgctaccaaaaaaaaaaaaaaattaaaaatgagccaagcatggtggcgcatgcctgtagtcccagctacccaggaggctgaggtgggaaaattacttaagcccgggaggttgaggctgtggtgagccatgattgcaatgctgcactccagcctgggtggcacagcaagaccctgtctgaagaaaaggaacaaaacatggtttatatttacctcaattaagtcttcagatcttgtttttggtattttccccatgacatgatcaaactattcaagcactgttgctccctttaaaaaacctccaaacaaacaaaaccccaaatctatcactttaatgagcaatgtttttatgactcttgatgacagaggaggggagggaggctgcaaaaacaaaatcagaaattcctaagagtttttgcccatataaaaccctatctctgttgcatccaagcccgtggcgattcacagcaattacaagaaccatccagggaattcccccgtttctcaccgtacctcctgcttagatttaagacactgataagccttttaaaaaggatctcccccttcccatccccatgactaataggcctttctcagctttgttcaaacgtctgtaccttgaaaggtttggaaaactgggatttccaaagaacgttaaagcctgagcccgggaagatcctccggagaagagcaaatgctcaggggactcctgagccaagcattaaacatggaggttgaggacagttatttcaagatttctaacaggaagcttttttttctttgcctctttgacttctagtaattagttaattgcccttatgactagtttgcaaaaatctgcagaaggaactttcagtcccttgagaataaagcctcttctattttaaggatctttctttctgtttttggttttggtttttttgtgtgtttgcttgaggtttggggctggtggtacaggggagatttaaaaaatagcagcatttggccaggtgcggtggctcatacctgtaatcccagcaatttgggaggctgaggcgggtggatcacctgaggtcaggagttcgagaccagcctggccaacatgccaaaaccctatctctaccaaaaatacaaaaaattagatgggcatggtggtgcacgcctataatcccagctacttgggagggtgaggcaggagaatagcttgaatgtgggaggcagaggttgcagtgagctgacacaatgagactccatcttaaaaaaaaaaatagaaaagaaaagaaacagcagcatttgcttattagcattaaggcacctggtacctggctctcccgctactatcccccactccagtcctcttccagaaagctctgggtccacctttatctctcaaaagctcttttaacacaaattctatgggaaaatgctccccaacaagaaaaaacagggttgcagagttaaaaacaaattacccaggcagtgagagaggaaaaaaacagagtagctggcctcggggagaatgagtgttttcaaacaggatttcaaaaggagatagctgattgatttagagacttaacaactcctcaaccagagaagagagaataaagaaaaagctcagagggcttggagtcaactcagggctccttaaatttatcttacaaatggtgttcattcatttccaaaactttctaatcacatgtgcagaacagacaggtctttcaccttcacaaaatacatcagttcaacgatttgattttctctcagaaatgtcacagcataaagaaggttttctgtcttttttttccccttcttttttcttagacctaaaggtgatatcatcatgactaacagcaaaaggtattcttggatcccggttttgtttgatgaactgttatatattaagtgttacccctttggtgagagctgtcaaaacagtttcatgtaatcttccccaggagaaagatctttgtgatgccacaaaactcaaattatacaaataactgtcaaaagccattaaagtcagctgcagaggtgggtgggggaggagagaacaggcgagagccaaatccttacttaacgtgcagggaaaattcaagatgtggcatctgctcatgctgatgaacaagaattcctgcctgcctggaatccaggggtgaacaattcattgacttgcactcctaagagagaagatgtagagtctggtgacacatatgggctctgaaagaccccaacagcctggccttgaattctggggccattgctgactgcttctgtcaccttgggggacctacttaacccctctgtgcctcagctcctcattcttgaaatgattttattttctctctttttttttttttttttgagatggagtctcactctgtcacccaggctggagtgcagtggcgcaatctcggctcactacaatctctgcctcccgggttcaagcgattctcttgcctcagcctcccaagtagctgggattacaggcgcgtgccaccatgcccagctaatttttttgtatttttagtagagacggggtttcaccatgttggtcaggctggtctcgaactcctgatccgcccacctcagcctcccaaagtgctgggattacaggcgtgagccaccgcgcctggctcctgaaatgattttaatcatggagcccacgtggtgggttgatgtgagccctgattcaggacacggtggatgtggcggtggttgacgagggttggactctgatgatgggtcctcgcccccacatattttcacccagtacttaaggtacagcagggagcatttgcctggcgcagaggagatctggggctgcattctctctcccccactctgtgtggtttgggccaacttaggcttccagacacccaatggtttgagagcttgggaaaaagaaaaaaatccccaatggaggagaaactggagttgcaagcatgtcatgttctcaggaagtgggaacaaggccccaaccctttgagattaggtcgctggttcctaagtaatgagagccggccaggggtccctctgtaaatctcggagccatctcccttggatgcacaggtgaactcaggagatctctttcttgacatctgtccccaggagggatggcccccagctgagtctcaaatcagaaacagctgtgggagtgggagctggcttttgtggttgaaaagcttccatgaagtcaaatggccttccactctgggtggttaggagctgaagtccttgatgcccctctcagcaggtgtatcctgaagttctcagcactaaaagtttttgcaggaggctgatctttgcagaagaggccctcacccatgtctgtgcgctcatctctaactaaatgcaggttgttccactccacacccaggagccagagtgatcgttctaaaaacaaatgggatcctgtctgatcctcaggcgaaacccttcacttgctccccgctgcccctgggtccgtccaggcttctgactgtggctcccaggccctggagcccagtcctgcccaatggcctagactcagccatggtgctctggactcttactcccctgatgccccaggacgggagctgccttttccctgtgcccccaccctcactagcagacccacatgcctgcctgcctccccaggccccagccttgtgcctccagccttctcccacccaggtgtcaatcacagtgacaatcctattgcttcgagctgagcctctgttgtcttcattcatttctacccgaaaagcaacaagccccaaatcacacacatgatagaagtagcgttcaaacctaacctactagcaggagccagattgcaggttcctgtcctggcttcatcatctgttgactgtgcctctgggcgagccacctcttcacccgaagtctcaccttctccctgtagaaaatgggatgatgatggtacccacctcgtgagtggctgttgaaacagcaaatgacatattataatgtgtttggcactcaacaggctctcaataactgtaggcaacttttattgcattatgttttcacttaacatatcttaaaaaaaaaaacagaaaatacagaaaagcaaaaagaaggttaaaaaaaatcacccataatcttaccaatgagaaacaaccaggatgaacattttggtgaaaatgattccagtcctttttcaatgcatataattatacctaagcctaaatagaaatatgcacatatgcaaacagatatatatgacatacacatttacctctctatcttagctttcctgagatgcaatttgcatacagaaaattaatgtatttgaagtgaacaattcaatgctatttagtatattcatagacttggatggccatcatcacagtctgattttagaagattttttggccccaaaatgaaaccccatcttcattagcagtcacgccatgtttcttctctctgcccagccccagcaaccatgaatccactccctgtctctgtgggtttacctgttctgagcatttcacataaatggaggcatctgatgcatggagtcttgcctggcttctttcacttggtctcacgtgttcaaggttcaactgtgctgtggcatggcgagcactctatgtctttttatggctgagggatattccaggctatggacagaccgcattggtttgtgcatcttaccagtcgatgaacatttgccttgcttctactctttattgtgttattgtgaataacacctctgcaagcattcaagtgcaagtttttccgtttgtatctattttaggggattgaaatctacacactgtttacaaggtgcttttcccacattgcagatattctccattaaatattcttctgcacagtcactggtctgggcttcatgggattaaatcttgggatataacataattcacttggccgcccagttattagtcaatctcagctccatgagtgccccgtgtccggtttgtgccttcctatcatccctccctcgttccaaaagcatctcagaagcttgatggcttcacctgtgagacccaactcactggatggttggacccaaagtccccctgagagataatctcccagcagtgcagccgtgagacaaggatgggagagcagcgagcgtgggaccaggtgggttcctgccaggggagcccaaggtaacaggggtgcgatgggctcctcaggcccctcaaacccagcatgtgcaacgctggctcagccctgaccttctacattcctatgttccctccatgcccttcccagaacctcatttggaaatatggggtcattcccatgcttgaggatgagaatgcttgtgaggattcccatggcctgcctgcccaccaagcctcagggccagtccccctgggctccaggagcagctagagaacagttctctctctcctcctgccagcctgagcgtgtgtgtgtgtgtgtgtgtgcgtgcgtgtgtgttgtgggggtaagaggacacattctcctccccaattttcaaagatacagtcatggccgggcgtggtggctcacgcctgtaatcccagcactttgggaggctgagaaaggtggatcacttgaggtcaggagttcaaaatgagcctggccaatatggtgaaaccctgtctctactaaaaatccaaaacaaacaaaaattagccaggcttggtggtgcactcctgtagtcccagctacatgggaggctgaggcaggagaatcacttgaacccgggaggtggaggttgcagtgagctgagatggtgccactgcactctagcctgggcgacagagagagactctgcctcaaaaaaaaaaaaaaaaaaagaagatacagtcatgcatcacttaatgctggggatatgttctgagaaatgtgtcattaggtgtcattgtgcaaacctcatacacaaacctcaatggtatatcctactatatacacctaggctacatggtgtagctcattgttcctaggcgccaaacctgcacagcatgtgactgtactgggtactgtaggcaacggtgagtatgtgtgtatctaaacgtgggaaaggtccgggaggaatacagtgttagaatcttatggaaccactgtcgtatatgccgtccatggttggccaaaacattgccctgcagcacgtagctgtatttcgtctctgcccacaaatcctcctcaccctcctttttagctactctgtgctcgctctaaattttctttttttttttttgaaaaacaaaggccagccggacttgtaggcccctctgctctcccctgcctcgttccactggaacgaaggagacaaggaagaggcaggggtggggagaccaagaggaggaaaagtaaatacctaaaaaccacacctggctgccatcaaaataatagccaacatcctctccattcacctcacacaagcggtgacatagttactgctattatgcccatttaatagatggggaaaactgaggctcagagaggtgggttacctgcccagaatcacacagctcataaacggtagatcaatgatttacacccaggtctgtctaggccccagctccaaaccaccatgagatacccccgaatcgcccctttggtgttcctactctctgtgagaattttaatttttttccattcttgattgttctcctttctttcctgtgtatgtatatacaaacgtatttttagctatgctaagtaattctctgccattcaaataacatgaaatgtaacagtaaaaatgtgaaagcaatttttaaagctcaaaataagtggctgtgcgtttaaaatagtgaacattttctaagcttattctaatatgactccctttaagagactgtaatctatgaaaaacctttgtttatcaataaaagttccaattcagttctttttcactttggagagagtgaaaaactaactcataaaatcatcatcttgttaatactctcctcacccttactaaaacacacacactctctctctgtctgccaagttatggcaaaatctccattgcacatggcttagttttaatccaacactgctatgtataataatgtttatttatttttgtaagggcaaaaaaaatttaaacatttttacaaaagtgaatgtttctctttgattttgcactctctcctatgttttcctttgtttttatttcccgatttcattcctttggtcacaaaaaaaaaaaatatgtattttttgcccaagtgattctggtcaatttcggtatctttttcagggttttgacatttgagaaaacttaatctaggtcagggagtacctgctgctgaaaagaatcttctggaatgccattttgatttggtgtaacctttgttagcaagttcatgtcaaaggtcactgagcacatagagtgcgggggatggccaagacctaaacaagggaatacatgtcaaaagcaattttccgaaagtgcctgcctcgacaagcaagccaccggcccgcgcagtccggggctacagagcgctcaagacctttccctcgggtgctgagggaaggatcccctatcagagatctccaaggaaggccccgcctccacctgcccctcccgcaggagagcgctgctgcagaatctgccgcctggccggtgttcacccagcgaacgagttctgctcccagctcgtttactcatgaaattaactgctgcttcgaaggaacggcagttcatgtcaaaagctgcacctgaaatctttcacctctgcgttttccttctacctgtttgcaattctcacgttcgcccctcaccctcaactcgaatgctgggtttgaccccactcctaatatcttcaaatcattttcattgatagggcaccttgtgttgtaaaaacggatttactttttaaatagataatttttatattagtcgatgtacaaatgtgctagagaaaaagaaaactcctttcccccgttcactccagccatgtggttgccctccccagaggcaaatctatctatctatctatctatctatctatatctatctatctatctatctatctatctatctatctatctatctgtctgtctctctatattttttgagacagggtctcgctctgtcgcccaggctggagtgcagtggcacaatcatgacccactgcagcctcgacctcctggactcaagtgatcctctcagctcagcctcccaggtagctgggaccacggcacgtgccaccaagcccagctaatttttctattttttgtagagatgaggtttcgccatgttactcaggctggtcccaaattcctgggctcaagcaatccacccactttggtctcccagagtgccgagattacaggcgtgaggcaccatgccccgcccaggcaattaatattaccagttttttatacttttccaaagatgctttagggatatgtcagcaaatatgtgcatatagtcacttttccttctttttacacaagtggcagcaagctttactcatggtccataggacactggatggtgttctttggggcatcttccagcaatgagctactctctgcaatgcttggtgtacgataatcctagcagctaacaccagggctttctgagctagcactaggctaagcttatcatgctcactttctcactgagttctcaccataacttaatgtggtagatagtattattatctctgctttgcagatggagcagaatttagagagactcagaggcacatttaagtgacataacacacagctgagtggaagagatgggatttgaacccaggttggcctgaccagagaaatctgaactaatttgtttgtctagagttcaatttcactcttatagtatgctacgttaggttaggtttcattatgtttattgagcagcttctatgtgccaggcacagtgccaaggcctggagatacaacagtgaacaagagagagatggttcagcccacatacagcccatgatctctgtgggagacaaacttcaaactaaggtagtgggttgaacagagtccccaatattcatgtccatccagaacctcagaaacaaccttatttggaaataggttttgacagaagttgttagttaagaagagatcatactggattaggaagggctctaaatccaatgactggtgtccttcctagaaaaggagaggacacacagaaagacacagggaagaaagccatgtgaggacggaggcagagattggaatgacactgctacaagtccagtgacaccaggagtcaccaggaatgggaagaggcctggaaaggattacctcctagaatctcaggagggagtgtggccttgctgatacctggttgcagatttctcgcctccagaacaacgtgagaatgaatttccgctgttttaagccacctgggttgtggtcatttgttacagcaactctcacaaaaaaatacagatgctacacacacaggtacatgggtaagatgctacgagggatgagaacaggaggcccctaatttaggtttgggacaggatgttggggagggtggtgtctaaatcacagagtgggccaatcacttgcacaggagaaagaatagaatgttccagaaacatgactttgctaattcttataattcttataattttccttccttccttcctttcttccttccttccttcctctctctctctctctttctctctctttctctctttctttcttttctttttttcttttttcttttttttggacagagtctcactctgtcgcccaggctagagtgcaatggcatcatgtcgactcactgcaacctccacctcccgggttcaagcgattctcctgcctcagcctcctgagtagctgggattacaggagcccgccaccacactcagctaatttttgtattttcagtagacacagggtttcaccatgttggccagactggtctccaactcctgacctcaggtgatccacccgcctcggcgtcctaaagtgctgggattacaggcgtgagccactgtgcctggcctaattttccactttctaggaaccgcattcaaaaagataaaaagaaatgagtgaggttaattctgtaaatttaataaaatgattttacaaataattatttaatatcatataatttaacaaataataagtaataaagttcatttaacccaatgtacccaaaatattatttcgacaggtaatcaatataaaaatccttagtgagaattttacgttctttcttttgtactaagtctttgaaatacagtatgttttatacttatagcacagttcaatttggaccagccacatttccagtgttcagtaattgcatgtggctggtggttactgtattggacagtacaggtctagaaaattctagtattttccatggcccttcacttatgccttgaaataaaaatagtagccaaggtcaggctcagtggctcatgcctgtaatcctagcacttgggatgccaaggcaggaggctcatttgaggccaggagtttgagaataggctgggcaacatagaaagatgctgtctttacaaaatatttaaaaattagctgggcatggtggtacatacctgtgttcccagctgcaaaagtagctgaggtgggagaattgcttgagcccaggaatttgaggctgcagtgagttatgattgtgccactgcactccagcctgggtcacagtgagaccctgtctctaaaacatagtagccaacatttattgagagcttgctgtcttccaagcactgtgcaaagggatctacatccattgttccaatattctctcctctaatgaattcctagtgatgaatgaatgcattagggatttcctaacagtaagccattcagcttagtacctggcaatatgagatggttgtcctatggcagaccagattcgtaaatcctcacaagcaggaacagactccagcgatacagctcttcagatatttactgctcatccaaatgagccagacaatgagctgggcactcagaggtttaaagaaacagcttctcttaaagaggagcactctgctgtccaacctctgtctagtgaaaatcagtaaaatgtcaagacattgtggggagactttaagaagttcttgcatctggaccaggaccagacaaatcgaggccacttcctagaaatcatggcagattcaaaatgaacacacaccttagggttattactttcagggatgtggaaatgaatgtttggggaaaggtctggttgaaactagaatcatcttcccaacagccttcagagggaaaggaagggctcaagtggagagaccacagatttggggaaagaggcactaaagtaacaacatttccccctcccctccccctacccaaataaaggtcccctgcggtgtggggtgcaggaaaaagagagctgggagatgagagaggagaactgacattgtggggccctgaaacctgaaggtcactttcttcatctttcacagctcaacttccttaccacttcctccaggaagccttccctcctgatccctggtggagctggtgttcctcctctgggctcccatgagctatatcctttttctaacttagcagttctctcccagaattataattgcctggtttacttgagtgtttctccctaaatcagagatctgcaattttttaaaaaataaagaaccaggtgataaatattttaggccttgcaggtcttaaagtttctgtcacgactaccgaattctgccattgtagtgcaaaagcagccacagacaaaacaaaaaccaataagtgtggctctgttccaacaaaactttgtggacactaaaatttgaatttcatataattttcatgtgttgcaaaatattgttcttctttctatttttttttcctcagccatttaaaatgttaaaactccttcttagcttgtggattgtccgaaagtagaggacgggtggaatttgacccctcagccatagccaatcccaggtcgcagacgtgagctcagtgaggtcccaatccagatgcaacggtgacttttatccaatgaattcccagcgagcaaagcctccctagagtggaacttgacaaatagttgttgaaggactaaattacagaactgtggaggtgatggttagagacattaactcgtcagaaaaatattaagtttgcaaatgggttttatttgctctaaagtgtcattgctttttttctcccctggcgaatgttatgaaatgctaattagctcccatcacaaccacggttcacagatctgtttgatctcctttgtcggggtgcgtacacagcaccctatattgcagactaaaataactcagccctgccagtggaaccgctgctgtgtaggccgacactgtcggtccaagagcgggaggccccggaggaccaaggagggaccgtggaacttgccagaagaaaggaaacagacctcagaaagatcctgttccaaggtcatgctgctggactgttggagacctttcccaaatgatagaaaatcattcgactcacaggaggtgaagatgctggggtcccctgaaggcaaagtttccctaacagtgaggggcatgcacggggcagagcatacactcacctttccctggcaacacacctcatgtcccctcaggacatacgtggagtgtagacaagcaacccgtcttctgcccttctgacaaactggtgtatggcaccatttccaaatccccacagacctctgtgtaccacggtttcccaacactatgctgctggaccgaggcgggagccttctccgctgtggggctgtcctgtgcactgtagaatgttaagcagcatccctgactcctacccactcaatgccaggggcaacccccacccccaggttgtgaaattatttatttatttatttagcgggagactctcgctctgtcgcccaagctggagcgcagtggtgcgatctcggctcactgcagcctctgcctcctgggttcaagccactctcctgtctcagcctcctgaatagctgggactataggtgcgcgccaccaagcccggctaatttttgtatttttagtagagacggggtttcaccatgttggtcaggctggtctcaaactcctgacctcaggtgatccgcccgcctcggcctcccaaagtgttgggattacaagcataagccaccacgcccagcccaggttgtgaaattttaaaatttcttcaggcattgctgaatgtcctcttggggacaaaattactccccttcccttagctgagaacctctactctagggcagtcatatcctaaatgcaagtcctcagaccaccgtgagcctgcaattcagctagcccttggcaggatgagggaaaaaaaacaaaaaacaaaaaacagagcgaatcttttctagggacacgtgattgatgtgaggaaatgtctttttccaggccatcttatttgttagcacaaacacgtcttttatgaagtgctgatgctgaaggatgtccaccttttcttttttttgataaatgtcaatccacccattattactattattatttaaagttttactggagtgaaactccggagtccaggaatggctggactagacaactgtaaaaaagaaattggattttccattctttccccttaaagatctcttgatcccagcgactcctagtgatttgcctcagttttctcaactgtaaaatgaagatgataattgtgcctgcttcatatggttttggttttggggaagaataagtgagaaaatgcattcaaagcactggcttggtttatatcctaaagatcctttggcttagagtctgtgattcacccagattcatataaacccaggataaatgttaaggattattactgatatcttccaactttgcaggatacagaaaagtgttgttatccctgccttatcctgtggctccgtttctggcaagttctatggtctgcacacgttattctctgcaaaataatgttaatacgaggaacttccctgagttgtccccaggttctgcactcaaggaaggcagttaacagtggaaatttctccagcagtctttcttccctgcacatttgcccacgtacagctcagcgtccagaatgaaaagagagagaggcataattacccattcacatgtctgtgctggcagcaccctttaaagacgggtgtcattcaaatgtcgacaccgctaattatggggtagggatcatgaaagtggagggaagcggtgaggtggtcagccggcctccccgccccccttccttttaagtgcccattatgaaatatttctctctcagctgattgaaagccctgacaagctccacctccagccggctttcatgttggatggctctgtgctccccacccaagggcctcccagctcctcccctgcaggcaggagagagggggtgctggggttggctgctggaggtatcctgggagaccctcgggggcacccgccttgccactcctggagccacctgacatttggggctcacccacatttgctgttggtaaagccaaacttcttgcctctcagaagaggaagaggaaaacaacacatttaagaagctattttttaaaacaggcatttgagacctgaaatggctccccaagtaccatggtttagggagaaaactataaatgcgtcagaagtatacggattagattttcctcctgcaaagcctcaaaaacaatcggaaaggcaacaaacaaaatgcagctggtctgtcctcagcactcagcagctgagaaatgcagtcattttcagagccagtggcatccctatcccagatgctgccatcattcattcattcattcattgattcaactaatattcacagagccctactgtgtgccaaccgctgggccaggcatcgggaatatagaaagcaaaccaagcctcggcccctgtggggagtcctgtcaggctggggagacaggtgccgtccaggtaaacccgcgtgctcccctgtgagcagtgctgtggggaatccagcagaggaattgagagatgctgcggggggcctgtacttgggggtttggcaaagcttctctgagaaggtgacatttgacatttatgacttatgtcccttccgtgcatactaaaatacagagtagggtcgggagagatggcactggaaatgaaggaaccagctggaaagtcagcccagggcagaacatgactttctgggcgctttttattagtgtttcctccctgccctgtcagagtgtcgcgtatactttttcaacaccccctaaacaaaaactcccttctgagattttaacattggggctatcagatcccaagtcagcttagctgtttcttccttgcttgggttaggtgggtgagatggagggacaaggggcgtgggcagagcagacctactaggtagatggagggtggtcctggctcgtgggatgcttttgtcaccattgccctggtccaggcctcccagcctggcctgagctctccagtccctctgccccaagcatctcccgactctcatgagagccccgtggggctggcgctttacagtttgcacatgtctcattggatccacacacaaaccatgtaaagcaggggcaatggcctcactttaccaaggggcaagtgacaactcagccaggtgaagtgacttgcccaaagtcaccaagcctgcaagtggcacagccaggactccgactcgagacttctgcctccatgtctcatgccctcctcacagttgcatccttctctgaagcggagcccaccgcagggtgagatgtctgaggtctgtgtgccgggatgtgctcagccttttccgaatctcagcctgggtgagccgaattcttccagggggcaacctgcccgggaagttgggtccagagccctttacagccacgaggccaaggctgaagggacatagagggcaggtgagaggaggtgacatttgaaagagtcctggaaaaggacatccagagacagagacacacacaagagtatgggaaagtctccaggggctggagaacctgctgcaactctcccttctctccagcttcagggcatgtaaatgtcattctcgtccacctgttggtggagccatccgtcctttgagatgcagagtgtgtctcccaggtcttgctggggttacggggaagggcgtgcctctctctctcctggtcccctctagctgggctccctctggtgtccaactaaagcgcctcttattgtccatatttgctggccctcaactggcggcatctggctgtggaacccagacccttcccttgatttccaattcaggctcccacaaggcctctgtgtttgctgctgtttacagttgatggctgaaaatttaggcaaaaacagagggtcgctctgctgcaacatgggtgacttcaaaagaaagagtgttctgccaaaaatttatttgccatttctaccagttggagccccagcttcgtcccctgtctccctctcctggctcttccccgccagctttgtttctaaaacagttaaatctagctaagcctaatcaattcaagtgtcttgtctttctgacactttctttgggtactggcctcttcatccttgaatatttattggggtattttcctaattcccaattatctaccctagaaaaattctgacacacctgctgggttgagagaatttttcattcttccacatcaggggttggggaactgttctgtaatgggtcatgcagcaggcattttaagcttgtggtccatagagtctcactccagccggtcaacacgtgctgcctttgtaggatgaatgcaactataaacaatatggaaatgaatggatgagtctatgttccaataaaactttatttataaaaacaggctgctggcccaggggctagagtttgcagatccttgttgtacataatcagctacttagctgaggggcatggaaaccactgaatcaccagacaggcctctcctggactcccatggggtgcctcctactaggtgctgtgggagggtagagaacatttcttagaagtctgttcacaatgaccctggctttgaagctgggataaggtaaagccagtgcccacttgtgtagtgggctgaacagtttccctgcaaaatgcatgtccatctgcaacctcagaatatggcctgatttggaaataggatcgctgcagatgtagataaggtaaagatcaacatgagattatactggatttgggtggtctctaaatccaatgagggtgatcttctataagaccaaaaaggacacacagtgagacagagaaaagaaggccatgtgaaggctgaggcacagatgggtatgaggcggccacaagccaaggaatgccaggagctactgggagctggaggaggccaggaacagattctcccctggagccttcagagggaccgcagccctgccgacaccttgcttttggacttctggccccagaaaacgcggagagagaatccatttctgttgtcttaacccacccagtttgtggtcatttgttacagaaaccctgggaaaccaatatggcacgtgggtattgaaaattgcccagtgtaattcagttgagttcccttgaaaaggagaagcaaagatctcctcatgtggatgtgtcagttcagtgtgttttggcctcataggaaccatgaatccgagataacgctgtaggggtttcaactccctggcggtggaactctgttgatttctactcttgttaaacgactctttcgcagtaatatgaagcaatttggccaatagtcagccaacttgcccccgtcttaagggtaagtaagccagtgagaagggggcccctggctctgacgtcacagcccaatgggagggggccaatcagaagcaggatctctggctggaccatgagaggagggaaagtgtgggtcttatgatgcttccgcagatggtgttgatgcccagagccccggcttgctccaatcagttactggaggagaaaactccaagttgttgacatggagacttcagacagccaaatcatgatctaaaagtgcaggtactgatgtggatggaaaattcagggccttggagtctgggttaaaattatccttccttcaactcagtgctacctcaaccacagggaacggaggagatgcattttcccaaaggaaggatgctggacggacagcatgcatccattacaaggtggaaaccatcgacacagaaagggaagggctaggagtagatcatgctttttatagccccctgaccccatgacaaaccccttcacacattccaacacacaagcctttattcaccctgattacctctagctttggacagagggcaggccttcactgtggctgcacacaggacccagtgtttgtaactgggctgcgaaattcttcacgtggtataaatcaccagggtttagtgggtgcaagcaacagaaactgaccagctgatgtaaggaaaagggaatttattggcaggacacagggaactcacaggactctgtgagctctttaatgatggcatctgccatctcttttgcgagtcaagaggagaccttgctgttctcctggtgagtggtcccatcatcagtgagctctctggaacttaattttccccttacatgtagtgtgtggttgtggcctcagagttatgcattgtgggttcacactgcaaggacgatagtacttgttgcttttagagagcctcccatctgttgccctcgggtcattgccaatgttgataaaatctccccagaaaagcccaggaaatgctattattataccacaggcctggaccaaggcagaagcagggcctccaagctggcctgggtgatctctgcatggttctgggctaccttatgttgagatagttgagtccgtgtcttcaactaccaggatcctggcagagcgtgggcaattatgactttttgcccaattatataatctccctggggtggggagtatgaccccaaaagcttccaagacaccctcaatgaaaccttggagggaatctgtaacatttgttccaacttaccagtgctttcccggggctcctcaaggacctcatggtctgactactttttccatgtaactttcaaaacacctttgctaaaacaaacagatgaaacttggcagcatgcctcggtcacagggctgagctggtacaattttctttttttttcagtcttcgaaaaacagttttcttcatctttctaaatttcaaaatcttgagtgacttagccatttgagcaggacacagaatggtgatgatttttattttatagatgaagaaaaattaaacattcaaaggggctgtaaccttccccttcatcagagagctttgagaggattctccgtgtctctcagttacagtctccaaacctcaactttgtccatggaagcacactccttctctacatagataataatttttgaaccaagttgaaatcaaaccccagcagatttgagcttgtcctgggaagaagcagtgggaaaacggtttccatgggtacagattttgacattagcagctgcaaatgttcaccaccccaagatgacaaaactccagtaacttcaaagctgttaagcatagcttcagggcaaattttaattaaatttagatagcatataggaaaagcatctaatttgtactctataaaagagtttgggaagcacagcgctggagcctcaggactgtggctgtaacaattatcttgcaacttttcacagcagaatcacaacatgttaatttgttaatgagtcagtcagagcagaagagagctcctgacagcagggaggaaaacatacagattccatttacatttctatttttaaatgaattaaatgtttcaagtcaaactcaaacttcacgtgaaagtttaaattcctacttttttttctaaactcagcatggctgctggattaagtattaagattcttgggatttcttagagagaactaagtgatttctttatttgaaggtggctacaattacatacctgctaaatgtggccatttagaggagatggagtgtttttgtttggttttgtttttttctttttgacagagtctcactctgttctgaagtgcagtggcgtgatcttggctcactgcaacctccaccttccaggttcaagtgattctcctgcctcagcctcccgagtagctgggactacaggcgcctgccaccaagcttggctaattttttgtatttttagtagagacggggtttcaccatgttagccaggatggtctcgatctcctgaccttgtggtctgtccgccttggactcccaaagtgctgggattacagacgtgagccactgcgcccggcctgttctatgttctttagaaatgtatccagtgagatagaaagatgttcacaatatattagtgggaaaataaagtttaagccttatgtattactgaaagaggcttggtagtggatatacatgcataggataaaacgtgcaaaaacataatcaagagtttaatattagttgtgtcttagaggtatcaggaatgattcatttttccttttatgcttatttctaccattctaattgttctagttctgtgatgtccaatacagtagtggccagccacatgtgacaattaaattctaattaattaaaattaaatgcaattaacaatttagttcctcaatcacactatttacatttctattgttcagcagccacatgtgacaattggtttatggaactggatggtgctgactagaacccttcaatcgtcccagaacattctgtgtaacagccctgatctataatgatcacggatttcttaggtaattgaacatatttttcaatatgtctcaaggcagcagcagagaagaaagggctgtttgaagccaggtttgccccatgcaggccgaaaggtgaaggtgcaagggggaatcagagaggacctcttccccggcacagaaactcggtggagaaaccacagaacagtggactgacaggttcggctcaacttcccttgggctgggccccttcatggtccatgatggtggcagccttacccttctgcatctcatcccaacaccacaacttccagaggccaagtgagcaaggcgatgttcccatgagcctctaggcagcctcccttcatgtctcactggctggaattgcctcaaattctcatgcctggaacccactgcttagtagagtgggattgccacaactgacttacacagatcaggattcacacttgagctgggagtagggtcgcttctcctgaggaggagctacctgaagttaatgagcattctcagtgaggaagaaggaagaatgggaatgttcactgaacaaccaacagtgtccactactgacagcaagtgatggaaaactcagtacagtctgacttgatttaaaagcaaagtgtgagttcacccagtggcatcagatgcagctcaattccagattcgaacaatgtcactaagattggcgtcttggcttacaaaatggcagcagcagctacggatctcacatgctcaccaacatctgataaaagagagggagctgatagccgcagcaaacatctctgcatgtgttattgactttaattgggtggctcaatccctgggtcactgagtgaccctgaaccaatcatggaagccttgaggcactctcgatgtaatgagcttagagtgggggaggggaggtcccagagacatttattgcactttttactaggagcagagaagagcagatgatgggcttccaatggtagattccactacaagatagcaacccagtggcaagctcaggaaaggccaagacttggaggctgcatcattccccttcctgagggtagggtctgctttggatatggacacatgttgccaattacaggggacagagagagtggaaagagtgagcagagaaagagctaaagactttgtttctaaattaaaccaaggtggaattcccaggagccaccagagcaaggaaagaagaaaagaacacctccttgagctgcccctcagtgaaagggcctatttctatgagtgtttgtctaaccttttctttaaccaggaaatcacaatgggattagcaattttctgcaaagaaactcttcggtgacttctctgggaacaaatttacatggcacccaatgcaagctgcattatgtttttccatcagtggattatgcatgcctacaaagatatctctctatatgcttctctgtatgtttctacctcgagattcagcctctgcttctctgtgtttatcaatttatctcccttttatccatccacccattcattcatctgtctgcccatccatccacccaaattttctgtctgcctttatattacactttcattgattttcatcgaggttgagggtctttgagggatggttgattattctcttccccttgctctgcttggcccccaagcagactactctatgcctggattcttcacattgagagctgaagtcagactgtgaatcattgattcagccaatgttcaccgggcatccgccatatgcaggctcagtgctaggggctgaggacgtagaatcatggagctcgcagactaataaaggagatgacattgatcaaataaccatggggataaatgccaaattgcaaccataagagaagctgcagaggggatgtgacagaggccatcccacaagtgctcacctcacagagactcgccatgtgcattccacagagagagagaaagagagagagagagagagagacctgctgggccccatggcagaatggcacaggggaccctccctccaatcctgtcagtccctctgccctttaagcaaactcgaaagctttcatgcatgtttttggtaggacactgaccctaaaagcagctacctcatgaggagctcagctcttcaggggagtagagcatgggagaggtcatggctgggggcctcacactcagtgaccactctagggcccggagcccctcactctttctgggctggccctcccaagagatgacatgtggatctctaagtagaaagctcctaaggaattttctgtgcagcttttgccttacctgctctggggagacatctctgcagggggattggatccagccagtgatgcttacgcctacggtgggaggatacaaatgtgaacgaggctcagggagaggaaagccttccaggagagggaaaggtgtgtgcaaagaccttgtggctggtgtgaacagagcaggttcaaggggcaggaggctggcagggctgaaagcagactaagcggggagatgtggtacatgaggagttggaagtttggcagggctggaccagcagggtctggacgactccggatgggatttcattccacgctcaaagagccacgggggattatgaaaggttttaaacagggaggaccttgatcaatttttgtagccaacttcaaatatcacagggtgttccagataggcccatcctgctcattaacatcgccacccccacccgcatatcattggccaaaacaagtcacaggaaattgctgcatgcagagggtgtgagtgcaccttcccccgtggaagggcactgcagggaaggatgggaacatgaggctaacggcctgtcgcagagagtctgggatggggatagagggagcaagaggaagacaaaaagaccacaactgagaagagaaggagaggtcgagcagccacctgtcccctgggactttgtggactggcagacctgtctgcggaaagttgtgcaaagttttgctgcttgatacgttgaataacctccttaatccttaggaagccctactggggataaatgtgccttttcaaggatttgggggttttgtttgtatttcctttgagtccagtgccatgctgacgccagctcaaaggtgcaagttggaactcccaggttaatttgggacagaaataataatctgatctcatcttaatttaactgattaaatcagcaacaaccctatttctacgtaaggtcacattctaagaaactgagggttaggacttcagcatataaatatggtgggggttggggggaggccagggaacacaattcaacccataacaaatggtaattgctaaagggcattagcgtatgtgctgtgaggggtatagcatggcagcccctcattattcttgggggatacattccaagacccccagtggatgtctgaaaccatggatagcactcaactttatctattctatgtttttcctacacagacatacctatgatagaggttaatttataaattaggcagagtaagtaattagtaatatagaataattaaacaatatactgcagtgtcactattcctgtgctttggggccatttttaagtaaataagtaaggattccttgaacacaagcactgggatgccgtgacagtcgatctgatcacccagatggccacggagtgactaacgtgcagggacagcgggggtccgcaggacaaagggatgattcatgtccccggcaggatgaagcagaaggatgcaagatttcatcaagatactcacaagggtacacaatttaaaacttatgaattttttatttctggaattttccattgcatattttcagactgtggttgaccatgggtaattgacatctcagaaagcaaaaccatggataaagggggactaccctgcatctcacttcacctccacaaaacccctagacatgtgttactattacagctggggaaacggaggctcagagaattatttgtccaggacttgtaaattacttaagggcaaggagggtttgcacctccttgggcctcagcttccccatctgtaaaagggagatgacacagttctccctcagtagaactgttatgaggattgaatgaatgcagactggccatcccctgaggtctgtgtctggcccgcagtaagtgctgttcaataacaaatgtggctatgtcccagagcaagggagaaacctgagaaagtcaaagcagtacagctggccagggtggcagccccgcatcccatagaccacatgggatcagcctgtgcgtgtggtttggcccctagtggtttcctgacatttaaaaacggaaagacttcacccaagaatgtaaatttctggttttgattgaagaatccaggagatctggcaccattcccagcacccgcctgtccaccggctgccctggagcctgaggccctgcagggccttaacctgtaatgggattttgtagctcctcctccatctctttaaaaatacttgcagcctcagaagtcccagcaccacagggaccacttcttcctgtcttgctgtcccccactctgggcggcccccacagtcggcctctctctcactgggaggcagggcccagccagctctcctggctcccttcaccccttgccccccaggtaaaccccacatcctggtggattgactcagggaaggaagttccaacaactccctcttttttcttctttccttcctttttctctttttaaatgtgtgtgtgtgtgtgtatgtgtgtggtgtgtgtgtatgtgtgtgtgtgtgtgtatgtgtgtgtatgtgtgtgtggtgtgtgtggtgtgtgtatgtgtgtggtgtgtgtggtgtgtgtgtatgtgtatgtatgtgtgtgtatgcatgtgtgtgtgtgtatgtgtgtgtatgtgtgtgtatgtgtgtgtatgtgtgtggtgtgtgtatgtgtgtggtgtgtgtgtatatgtgtgtgtgtggtgtgtgtgtatgtgtatgtatgtgtgtgtatgcatgtgtgtgtgtatgtgtgtggtgtgtggtgtgtgtggtgtgtgtgtatatgtgtgtgtgttgtgtgtgtgtatgtgtgtgtgtgtgtatgcgtgtgtgtgtgtgtatgtgtgtgtgtatgtgttcccaggcttccttggctcctaatttacatctgctcgattttatcacattgtgacagcaaaatgtgcaaaaaaattagtagaactgaaaccaaatgtgcagtgagagtgctttccagagaggtcctgctgcccctcccagagttcagagccccactccgggtttctgcaaatgtcagcccaggtggggtggtgtccgcagctctgggtgcgagggtgtctgtggatagaagaggcaggagctggaatccaagcattttagagctaccgggatgtttaggggtattgctacaaccttggcaatttgaaagggagaaaccgagacctggagagatgacaaaacttgtcatatattccccaaagagaaaaggctggcagaggaaagagcccaatacttgatcagtttcctatagatttctttcctgttttatatgaggttgaggtttctttcagagaaattcctttcaatctgtttttgctttggggtcagacagatctgtgttaaaactagctatgtcactgtaagatcctgcataacttatttaaccatcctgaacatcggtttcttcatcgacgaaatgagagaaataaaggctaccctaaaaaccttatcattagttgcccaggaaggatgagtttgactgcgagtgatagaaacccaggggctggctgagctggatggtggggtgcagagcagaagacgccaagtcctccagcgggagcctccagcaacctttcagcaaatacttactgagcatctgttacatcccaggcattgtcctaggcctggaggacacaggtgctgtcctgctgtcatgcaatcaaagaacacgtgtcgaatgcctgtgtgggcagagcactaggtggccctgggggaagctttgaggctagaggggaggagaagtgcgccggccgagaaggtgagaactgtgagcttagactgggctagtggttctcaaacaggggcagctttgtcttcccaccccctctccccgcacacttgacaatatctggagacatttttggttctcaaaattgggatgaggaggtggggctttgctaatgacctctagcgggtggaggacagggatgctgttagacaccctgcaatgccaggacagctctcactacgaagaattaacctgtcccaaatgtcagtagtgctggaggagaacaaccctgaactagggaagggcagtggggctggagagaagggggtggattggagggagaatttttccttgaaataaatgggacacgagccgggtgtgaggctgtccgtgtttgggttgtgcttgtgtggtgtccttgtttactcagcttgctttctgcttctttgaaaaataccagcggcaggaactccaggagcagatcctccagggcccccatctaacctcccgctgcaaggggcaggcctgctccccacaccattctgggctgcaggggaacagacactggcaaatgttttttagagccaaactccggtcttgtttttcaggttaaaataaaatggagaggggcaggcagttgatggcttattaaagaacctcttgatctttctgtttccgtgaaaaggtgcttgtctctcttgaaatgaatgtgtctgcctttgctaagggaaagaggggaaaacgccctgaaaccacattccagggtgagactggaaactttcttattaattcccccaaaaaacatgaacccaagcaaccactaaaaacccaacccagagttaagaaaattcaataagtggcttttaggaaaataaaaaaataaaggcgaaaaccccaaacaggaaataaacccattaagtggagcgttttggtagatttgatcttcgcctggaaccagaagccaaagacctggccccttccctgcaattactcacggtatctgggcccaggcaaataactgcatcattcattcagcattcacttggggctatgacgtgccaggatccaggcaggaaactgatggcacagggcaggcaacccatccctgtcttcatggagaaggtatttgttagtcatccaacaaacatggcacccactgccttacttatgactctgaagttctcttgctcagtcatttgctggcttgtgtctttcgtggctctctccatgtggaaagccaattccaaggtgcccccacctcctgctattcatgtcctgtaagagcttctcccctttagtgtaggctggcctagggacttgcttctagccagtagaagattctagccaacagtagcttccagccaccttgcatagggcaaagtgatgaaatatcacttccattattaggttatgaaagattgtgactttcatcttcctagtagactctctctatggccttctagccttgcatgctttgaggaaacagtttgccagaaaggcctgtgtggcaaggaactgaggggggcctccaaccagtggccagaaagaacatgatgacttcagtccaacaacccaggaggaactgaatcttgccaacaaccactgagtgagcgtggaagtggatcctctccagtcaagccctcagatgagacctcatccctgcatgacactttgatgacagccttgtgaaacaccctgcaaagtggacacagctaaattctgcccagtttcctgacccgcaaagactgtaagataacacatgtgtgttgttttgagttgctacatttgctggaaaggactgtgtccctgtttctggggcaatgcctgtacacagaagatgctcagcaaatgtttgaggagtaaatgaatgaggagtttatgccatgcccattgcctggcagtgagggtgcagtaacggacaaacgccgcccctgacttctcaaacttaaaatctggcagaggaattaggcctggttattcctatgtttctctcccaacagattcaaggacatgataaagaattataagcctagagaaaagagtagcaaattctgatctcagtccacgggttgaggtgaggctatgggaagtacgatggaggaatgagggtttaattcaatgaggatgaagtagctactatgggtctgcatgtgggagatcaaagggcagaacaaaatcgttcttctccacctgggaatttctaattaatactacagaggacagcatcaggaaagaaaaaaaacactttaataatgaagaaaaccactgaagcacaaacaatggaagcaaagaacacctgggtttaaagcccagctaagccatttctagctgtgcaacacagagcaggttctttgcctctctgatccctgattttctcacccataaaaatcagcaacctgctgatagggttattgagggcaggagagaccatgcctgtaaaatgctttaaggcatttctcagcacagaggaggtgcttagtacataggaaccgtggggaccacccgagggagaccaagggtgacgtggagcagtggaggtggcagtaagggttgttccattcattgctttctttgagagtttataccctttctgatcctttatttgcattttggttggaacctgcagtgggagaaatggtgaacattggtgattaacccaccatctttacccagaagtcctttctctttggaaaatggttttctcttgatgttatggtccagcgttcccacagtctcctccccgggctgctccttctctgtctcctatggactgagggtttacacattggctttcaggtccagtcagggaacctccattcctctcactctcacttgcctcagtggttttacctgcgaccgtggctccaagttccacctctgtactgtgactctcaaacacacacatgtgcctagggctttcctccaggctctaaactatctgtccaacagcctgcctgatgtgcccactgggtgggtcaaatgcatttccgacccagtgtcctctaaaaccacactcatgattctgtcctccctgacatttccagctgcccagctctgtgacagaatccatatccatcctggtgaggcagccaggatctgaggaggggtctcagccccttcctctcctccccacgtccagttcatcaccagatcctcttgttttttcatcagaccttgaatccatgcacccgggtccttctcttcctctgccacttagctggaagcattcagctgggactgcacagtcacctccttgccctctgtccatcctctcccaccagagcagcagaatgatcttttcaccataaacatcagataaggtgacccccctgcaaaaatcccagcaatgtttcccgttgcttttaggataaacaccagactcctgggaaaaatcaaactccttttaagggtccataaattcctgcacaatccacctctgcctatgtcttcagcctcatgggaagctaccctcctgctccctgctgggttctaaaggcactgggctcccttctgaagggcagtcctgaaggcacccacccgtccttcgccccagccaccttctcttagttgactcttccttcagttctcagctcagccttaactccctaatggagccctccctgactaggtcaaatcccctctcctaggacagcgtgcatctcctatcagtcgcacaccatcgtgatatttctttctttcttttgtttttttattatactttaagttctagggtacatgtgcacaacgtgcaggtttgttacataggtatacatgtgccatgttggtttgctgcacccatcaactagtcatttacattagctatttctcctaattctatccctcccctagcctcccaccccctcaacaggccctggtgtgtgatgttccccaccctgtgtccatgtgtacttattgttcaattcccacctatgagtgagaacatgcagtgtttggttttctgtccttgtgatagtttgctcagaatggtttccagcttcatccacgtctctgtaaaggacatgaactcatccttttttatggctgcaaagtattccatgatgccacattttcttaatccagtctatcattgatggacatttgggttgattccaagtctttgctattgtgaatagtgccacaataaacacacgtgtgcatgtgtctttatagtagcatgctttataatcctttgggtatatacgcagtaatgggatcgctgggtcaaatggtatttctagttctagatccttgaggaatcgccgcactgtcttccacaatggttgaaataatttacattcccaccaacagtgtgaaagcgttcctgtttctccacatcctctccagcatctgttgtttcctggctttttaatgattcccattctaactggcctgagatacaccatcttggtatttctattgttatttgcacacatgatccatcagcatctttcccccacgagacagtaaacaccatgagggcagagatggggatctctggatccctaacaatgagcatagatcaagtccaaggttgatgctgaaacagaacaaaagagttaaacaatgtgcaagaaatacaaaataatagtaaaatataaaaagcatgaatcactgtagtctttggtgtcaggagagctccccagtgttgggattgtgcccaaatggaagctggggcagcaaggccttccgcatccttgagtgagccccagggctgtggaggtatagctgcagctctagacaaaagccaggtgagctctccccaggtgttcactgcatccaccatcaccgattatttccttggcacccactcaaagctccctgcaagtcaggactctgcccctgttgaagcttgaaaacatgcagcattagccttgggaaaaggtggggagaactatctgtctatgaaccctccatgtagcagggtggaagcccgtctgggacacaagagagcatggaggctgtggagctgggttcacagtcttggcactattgatgttgggttgcatcattatctgtggtgggggctgtcctggacgttgtagaatgttgagcagagtccctgatctctatgcactggtcatcagtagaagccccctgtagtgacaagcaaaaatgtctccagacatttccaaatgtcccagggtagggggcaaaatcatgccgggttgagaacgaccattctggagagtggacctcattgactgattgattcattcattcattcccgagctcctactgtgtgccaagctctcaggatgctgcagggaacaaggcaggaagatccctgccttttgagagcttatagtggagcaggggagacaagcagacaaataaatgcccaagatgagtgcagagggtggtgagcatctgggatgtgatgacagtgcatccgctccaggagcaggtgccgtgagtgtcttctcactgctttccccagtgcctagcacagaacaagtgcccaataaaaatatactgcctgaacgactccctgaaataatccattgttagctgccaaaaggggctgctttggatagggtggttagagaaattcctcctggggaggcagattcacagctgataactgaatagtgagaatgagccactgtgcaaagacctagggggaagagtgttccaggctgtaaaagcagcatgtgttttgttccaggtctggagggggtttggtttgttccgggtgcttatgtgtaatgtacttgcccctcattcacctggctaagtgccaagtgtctgctggtttcagctcaaacccggcttcttctggaacccaccagcctggaggtggctctgacaggcacccccacagtattctgttcttctccttgagtgtcctgagcacatgccaagcagttctcctatgtctcactggatggtgaggttgctggggccagagggccagaggccacatctgtttctcttcaccattggagccgcagcttcaagactgtgtgcctggtatgctcagtgagcacatgatgaataaatggatggataatggatggatgatggatggaagatgaatggatggttgcatggatgatgaatggatggatggatggttggttggatggatggatggatgatggatggatggtggatggatggatggatgaatggatggatggatgtttggttagatgcatggatggttggatggatggatggatggatgattggatagaagatggatggatggatgcatagatggatgcatggatgattggatagatgatggatggatggatgcatagatggatgcatggatgattggttggatggatgaatggttcggtggatgatggatggatggatggatgatggatggactggaaagagcctatgtgaaacccaagcttctgagaaccaagaaagtccaaaggtgactcaagaaagagaataagtctcttggacttttaaactcaacaacctgtgctccattccccaacctgagcccaagtccccaagttcttgctccacattcactggcagatgccaagagctgagattagtttcaagaagaagacaggaagttgatgtcatcctaccattaaggagtgattcagagaacaggtttttggttgccacagcaactttaagtatcagagctctctctatagactttggatgtgtgtgtgtgtgtgtgtgtgtgtgtgtgtgtgtgtgtgtgtgtgtgtgtttagggatggggagactagcactcttaagttcagacaaacattgagacgacaggatgtgagctgtctattagatcttgaagggtgttgtcaaggggagaagctgaacttgttttccaaatcccaaagtattaaacctcaagggcttagtttgagggcaaataaatatctatcaagtggcaagctcacaaaatccagcattcaagagagccttgaaatggaagttaatacttccagtttggagatgtagcacaataaggcagaaaagaggtgggcttggagacatgcagatgagattttaaatccctgactttgtctcttattattgatctggccttggccaggacataagtctgccaaatctgtttctacatttgtaaaatgtgtaaaatgagagtaactccctcttaaggtaataaggatcgagtgggtcacagtgggaggcagggactgcatgtgcagaggccttgtggggacttgggaagcatttctggtgagtgagggagaccagtgtgagactggctagagtgattggcaggagctggaccatgaagggacacatggggctcaactgtggttgatggtggagggattgggctgcatcttaaaaacacagttctcaaaatatagagccaggcccagcatcaccatcatcctctaggaacttgctggaaatgcagattctcaggtcccaccccagaccttcagaatcagaaactcttgggggtggagcccagaaatctgttttaacgagccctccagtgcatccatttgatgcacttctgagtttgcaaagcactgctgcgggcaataggaaatggttaaagtgttttaagcaaagcaatgagaggatcagattaacttttggaaaagtttcccttctgtcttgaagagtttcattggatatgtatcgcctttgctcaaagaacaagcactgtttataggtagggttgccagataaaaaaacaagaggccagttaaatttgagtttaaataaacaacaaatacatttttagtgtgactatgtctcagagtacatgttatactttatctggcagtcctaccatagtcactgaatttggagtcccccagtgagctctggcaaaggcatggctggttggacaacgactagtttccttgaaatcttctggaacctgggggtcatctttgagatgagcccatcgatacaattgctcagtgcaccatgacttccacgggaatggtctcagcatctacagagtgactcacactgaactggttagtttcagaaagaaaaaaataataacaaaaatgactgcgtggttgtttattactgggctgcatttcagacagctcccgtgttgcaatctcgtgatttatagctttttgctgggctgacccaagctgggagaggaggcctgttccaccctctttgcctgttgggcccttttcacgtgctggggacatctgtgaggttgtggaagctgtccttgtttagagtagctgcagcagcttccaccacagcgccaagctgtgccccgcttctggccccttggggacccactctgggcagtgggcacggcaatcttttacttgactgctgtgatctttggtttacagataaatacaccgtgcaccccttgcttcgagtcatagaatttttgcctgttttccaggcaaacacctatctgggggttttctgttcaacccagagcttccttctggtttatggaattctgtaaaaggtttggaagaagacagacgtgcacgtgatattggctccatcacttcttggctggagaagattacatgagttcctttatccctccaagcctcagtttcccattctgtaaaatgggaatcataatcatcagagccccttcgtcacagtgttgctgtgaggtctgagtaaggaaacgccagcaagtgcatctttggagtaggagaacatgtgaggtctggttgagggggctcctcacccggggcaggccccagccaaccaccccgatgacgcccaagatggagaacatggggtgaagcactccagatggggaaaacaggctaatgctggtaaaatgctaggacaccggaaaattactgcagcttattgtggcttcaaacaataggagggagggatgagaaaaggggaacatctttagcaagaaacaaatgaagtcttgtttctgcgcttttgaaaatggaagtagatgaatcttttctctagttggcattttgctttatgtgctttgtgttttgatatctttcaggagcctgggattatgaaagtgccaatggtttcaaaaacaatcccctatttttttaactgccattttaagttgtgaatttcttttcttctaaaggtgtcttgctttaatgttacaccatttcactgaatcaaatgcacttcttccctcacaccatacataatggaatatacattctattatttccccaaaagtaaaattaataatacgtttattccctaaaagagtagtgtgcttatgttggaaattaagcagtggggaaagaagagaaaggggaaaaacagattcctagcactccaagagatactcactcttttaaaataatggttttgttcctgatttttatctgaagcaaaaggttattaaagtaaaaaatttggaaaataaagatataaaacaggtagattaaaactgcactacacagagataatgactgttatttacacacacacactacaaatttgagttctaattatataaactcatgactagtataaaatacaggttttaatcatttaattttaagctatgagaatttcccatgttcctttgctctcttggaaaacaattacttctgtggctgtacaatagccactctttcctgtggctgtgccaccctttgaccacccctcatcgttgggccgttaggtcgtttctagcttttctcctttgcatacaactccccgaaggcatttggccactaatctgtgcccacatttctgaacgtggcctaagcacagatttctcagatgtcttcgtcttcagagaatgcaactattttaaagttaaaattaattcagtatgaatcttctgctaattttatgttgatgctcttagagctaactggaattcccagggtggggatatggagaacaggttgctgaattcaataatttgtcgaacgttggaatggtctgaacatctacctggggaaagtaaaatgaaatctcggctctttctgaaacatctgtgcctatgttgcagctgccaacacaaactttggtgcaatgaaaccacaatgctctccatcaatgccgaacacaaaagcaagacagcactagctcgccaaaagaggttctggggacgctggactccattcccagaaatacacaacttgctcgcattgcaaaaatgtctgcctggagtttcctcacagggcttgctctgcctggactccactcctgctgactggagccataagctcagtcctaaacctgaagagccagtggcagctgtcccaggattcacccagttgcaatttggaatgggttgaaaggctgatttttatctcgagtgaatattgccaggtttcctaggatgaaagggaatcacaaggatgagacagccagcagcagaggtttagacacatggtgtggtcatgccccagcatgaaactctaggctccaggttctccggacacaaccctgccctccctgcttaaaactcttagctcagagcacctgggcttttcaaaagatgccttaagcaccaggcactattcccaagcccatcttcacctatgttaccttctctgacagtaagattagcacatgcttcgaaccccaggttctactgtgtgaccctgtgtaagtcacttaacctctctgagcaccacttttctcctttataaattaggataatattatgaccttccttcaagggttggtactaggattaagtacattaatgcaaataaagtacgtgtaagaggcctaccgtgcagtcattactatttttgtcaccagaatgtgagctccacgggacagggactttgtctggtttgctgtgcaccggaggtgtgcctagaagaggtctggcacaacttagcataccaaaatgcgtgctgaacacacaaggatcactcaccctggaccggcactctgagcagggcgtctgagcctttgattcctattttctgcttctagggatgcgtgctgctgctttaacttccccactgccttcccctgtccacagagaggggcggacatgcgggaccaaagaccgtgtttctgactctggtctcaaaggtcatccctcgtttcttcctccagcgacgttcagcgagccctggctaggggccaggtactgtgctgggacaggcactggtgccacagcagcgaggaaaacagacaaaaatccctgcccttctggatatggatatttggggccctgtgaaagaccaagcaaagatgcactgatttttcttctatgccaaaagaaagcctgaatgtattcattcaaacccacgtttccatcttttgagtactttctacatgccaagccctgtgctggacccgagtctagcccctcttctctggagcagctcttgcctcttggcaacaccgcatgtatagaaaatggtagcatctagacagtgtcctgggcttaggcagccaggctctggggagtccgttatgaggcttggtgaaaagcttcatggcatttaaagtactgtgtaatgataataaagacaaaatacaaaggattacggggtatatttaatactgagttttgtttaaagcttccaaataaaatcttcttaccttaaaaaaagaacttgaacttgcttccatataggttcctagcttatgccagattttatgcttgacatgatagcacacaatttctcagcaagaattttgttagggatatctggaaattactaattgccactctttatgagaaattttgaataaataaggaatatattttttaaaatcatttttaaaacaatattcaaaaaaggaacataaaagaacaggtgaaaattatattgaaagaatccaaagattcttttaacaacataaaatattgtaatttcttacgattgtatgcaagaattccaaactgaacttttccataccacgtacttcgaaataacagtgatgctctaatttggagaacagacatgaactgtgagtgcggtgactctgaagccagcttggatgatgctaaaaggacacatcagctgcaaatcaacaccagctgggctctgggccatctggaccctgcccacctgcagcctccacccagcctcctgcctccacctccctccagctacacctggggtggcacatcattcaccttcagcacctgagacacgagctccctcagcgcccccaggggcccttgtccatgagagcagaggtgtgcttgctgtgggatgtggacgaagatgctgagatgctggaggatctcctggttgaacctggagcatcaggcagagcagagtttgtgccggttgtgtggggagtatggggcagccattcacctcacccagcttgggccatcctccgagggtccctagaggaggctccaggcaggggatggctggaactggagccctgcagacttgggtctctgaccaccctaatccctgagcaccatgttatgcactggtagctcacctgtagggctagagcagtggttcttgaagtggggtccccgggcctgcagcatcagcagcatcggggaacttgttagaaatgcatattcttgaacaaaaaaccaaacaccgcatattctcactcataggtgggaattgaacaatgagaacacatggacacaggaaggggaacatcacactctggggactgttgtggggtggggggaggggggagggatagcattgggagatatacctaatgctagatgacgagctagtgggtgcagcgcaccagcatggcacatgtatacatatgtaactaacctgcacattgtgcacatgtaccctaaaacttaaagtataataataattaaaaaaaagaaagaaaaaaaagaaatgcacattctttccccccatccctctgcactctgcgttttaacaagtcctccaggtgattcgggtgcatgttcaagttcaagaagcccaggtccagaattgcttcttgtgtcttaccagccttcttctcagctatctcgatctgttggaggtccccctctgccagggaacagtaagaccctgcgaacaaaacttcgctattgcatcacctggagagaaatgcagattcttgggccccactccagacccatgggggatgattcaaaggtaaagtttgagaatgagggacaatcttgttaaaacgagttgctggtttgagaacctgcaattctttgtcttttctcttttcttttcttttctttctttctttctttctttctgtctttctttcttttttttcttttcttcttcttttttttttttttttttttgagacagggcctcattctgtcagtccaggctggaggacagtggcacaatctcggctcactgcaacctctgcccccggggcttaaacgattcttccacctcagcctcctgagtagctgggactacaggtgctcatcactacacctggctaatttttgtatttttttgtattttttttttttttagagacagggttttgctgtgttgcccaggctggtctccaactccttgactcaagagatccgcccacctccacctcccaaaatgctgggattacagctgtaagccactgtgcccggccaagaacctgcatttcaaacatgctcccaggagaggctgatgctatgggctttggccacactttgagtagcaaggtccaaagcccctagaacagggctggtgagtggaggaggaaagaagctctcagtaggatttctcctgcctcaccctcaagctcaagtcctggaaacttctgggaagtgaactgtagttggaatctctgtttctccactgaggggctgtgtgaccttaggcaggagacttcacctctctggtcctcagtatcttcagctataaagtgggtctcctgagagtgactcctcctagtgctgctaggaagggatggaagcaaatgagccatcaggcacagggtgcaggcgggggttcccctcctcacatgctctcctgtggactagtgatgctggtgggtggccgaggacgcatcacagagacccctctggagtgggtaactggagaggacccagacaaagccctgggcgagcgccctgcacagagaccctgcatggagggggaaggaggccctccattgattgggacatgctcatcttgaccatccgttgaccacccccagcctcaggaatgcagatccctgtgaactgtccggagaccacaccccagtgctccaacgagtcttggatgtgcgggtggagggcgaaccccctcttaaagctggggcctacggagcagttgctgagatgaaattcaggcctggccccatttaaatccagcccccacctccccctccttcccaattcggcctcctcatcctgcccaacctgcttcacaccccgactcagccagcaaacagaggtctccctttccttcctccaaaagggaaggggctcccccagggcctccgctggagtggttctgggtctccaaagtcggaagtgcaatcgtgaccaactctcagctgcaccctctgctgcctgcagcgggtgtttcacttgctcagcaggaatcctgcccctggtgacacctccaccccaggaggccagcaagcccctcagggagcaaaaccagttgctctgggagacctgggccttccccaccgcctccccctgtccacagagaggggcggacatgcggcaccaaaaaccgtgtttctgactctggcatcaaaggtcatcccttgtttcttcctcaagcgacgttcagtgagccctggctaggggccaggtactgtgctgggacaggcaccggtgccacagcagcaaggaaaacagacaaaaatccctgcccttctggatattacatcccggcagagagacagagacagcgttccagttacttaataagtaaataaaaatacagtgtgtctggtgacaagtttgttggaaacaaagcctgataaagtcacgggggcccggtgctattctaaagagggagtccaggcaggcctcaatgagaaggggacatttgagtcacgacattaaaaaggcaacgcctgagccaggcaggtatctggggaagggctcatccgggagaaggaacagccagtgcaaagctgctgagggcttaagaaacagcaagaccgccagcgtggccacagcgaagtgccggagggaggggaggaggggaagtcagaggctctcgtcacctgcggttctcaggggacatctggcgacatctggagacatttttccattgtcataatttggggagtactacttgccatcgagtgggtgggggccagggatactgctaaacaccctgcaatgcccagggcagcccctgctcagagaacggcccagcccaatgtcaaaagtgcagtagttgagaaattctgctctagggcttggctctgctccgcttataagtcactgcgatgaccttgctgtcaccctgagaggggaggaatccattgcaggggctggagcattaagatcacactttggttgcagcagcaccccctggctgccaagttgagaatgggcagcccagaggccaggagggcagcagggagcccagggaggaggccgatggaacgcccaggtgagagggtggtggcccaggagaggtgataaaggatcagagtccccacctgtgatttcatcttcacccagtaattccaacctggggcgccagcctaaagaaataggcacatactgaaaaaaaaaaaaaaggttcacaaaggaggctagtattatgattgaaagacaaaattgggagtaacatctccattcattcaacaataggggcccagacaggcacagctggggtgggaactctgaaaaggtagcctgctctccaaggtgcctccttgcctggagaggggctccatcactgtgtgtcacctgggccatcagggagatcatggccagcacctccatgggctcccacacaccccctctggaggagcttgggggatgaacctgtggctggaacccgtggctggaaggatgtgtggaaaatgaagacagagctggttgaaggattttcttctttgttttgatatttattcaagtaataaaatccaggcaatgagtactcagacaaaagagaacagccacactcaccaggcccaccagaggcatgagggaggcaggaagagcctggaggtctggagaggggcaggcccacctctggggcgcgacaggggctggcctgagcctgaaaccagtggggtgggggtttgggatggggtcagcacacagcatcgcaccctctgaagacctgtccctgagattccagggccgctcctccgcttcgcttcccactcatcatccatgcctccccccaccccccactctcaccaccttctagaccaagtagtgtaattaaagtcagcaattttgttgggctcaacctgaacatgtgggtacacgggctcccgatttggcctgcctccgagcggcgggaggtgtttccaataaacttgggcgtttttaatgagtcctttacaactgctaaataattaagccaaagattgacaagagcaactggtagccccaaatcttggcagcaaataagaggagcagggtcccaccctgccatcccctccagcgggcctgtaaattacgccgcaaagcacaagtacagctgtcagagcacggcagcttgagcagcttaggaaactaacaagcacctataggtctcacagttacctgggaggccttattttattttttccaggtttgatggggatctgcattgaggatggcgtctatgccactcgtacggcggagacccagagttccgcagatgtgtgtggtcaagcctgcccagcagcgtggccagagacagagcagataaaatataagatgtccaggtcaatttgaactgcagataaacaatgagtaactcttcttctcagcacaagcaagtcagggcatacttacagtaaaaaaagttattcattgtttatctaaacacccaatttaactggctattctgtatttgatctggtgattcctttccacatggaaggcctgtttgaaaaaatatttacctggagagaaatccaaaacatggtcactgctttctcactgggcccttccacggcgtatatctttggtgggtgctgacacagtgagcttgcagcaggcaatatccacagcagctgagatggggcttcatggcccgggtcggagccctgactcagccacttgcttacctgtgtgatcttgggcagctttttaacctctgggagcctcggtttctccctgtgcaaaacaggcatgataataggaatacagtggtcccccattggcagtttcgttttcctaggtttctgctacctgcagtcaactgcggtccaaaaatattctgaaactagaaaattccagaaagaaacaatttgtacgttttaaatcgtatactgttccgagtagtgtgatgaaatcctgagccatcctgctctgtcccaccgggatgtgagtactcccttggtccagggtgtccacattggccacactatctgccctttactgtacaggaaaaaacgtacatagggtttggtactatctgtgactttaggcatccactggggggtcttggaaagcatcccccacagataagggaggaagactgcctttcataacattgttttgatggtgtccgaacatacttcatattaagcacttagtacaaagcctggcacttagtaagcccttgaacacatgttagctggagtcattttgtgttttaaacttcattcctacggaatccatatcccaaacttctgatggcctttccattaaaaggacaagatcagaatgcctgtgttggaacaaaacatggccccttatccaggcatggtggtacacacctgcagtcccagttactcaagaggctgaggtgggaggatagcttgagcctaggagttagaggctgctgtgagcagtgatcactggtactccagcctgcatgacagagcaagattttatctcttaaaataaataaaatgaaaaaagaaaacatggccccaaggctaatgttttgggctggaccccaaaaaactaggaccttctgctttcaaagtcagtctggttgccttcgagtgtttatggggtccaaccaggacaaaaccatgacacactttgcacagttccccagtagcaacacagggactgtgctggggccacctggttagaggcactgttcctgaatttgagaaccagttgaaaggtaatcctgactgactccccagtcccacatctaactgctgggctcactgctatggagatcataccaggacatggtgactgattgtgttggaaactatttgagtcacttgcctttccaattcctgcacagctctgagcaccgggccaggttcaaagtacaatcatgcattgcctaacgatgcagatgcattctgaaaacagaatccttaggtgattttgtcgctctgtgaactctgtagcatgtactcacatgaacttaaatggtatatagaaggtatagcttaccacacacctaggctacctggtacggcctactgctcccaggacacaaacctgtacagaatgttactatactgaacactgtagacaactgtaacacaatggtgagtacttgtgtactgaaacataactaaacatagaaaatggaatgcattgcactatgacatcatggcagctacactgtcactaggcaataggaaattttcagctccattataatcttatgggactccatcttatacagtatatgcagcccatcatatatgtaatctgtcattgactgaaacatctttatgtgacacatgattgcagaatcaggaatctgctctccaggagctgaaactgtggaagaagagatgagctatgagggcaaataaggctaaatcaggccagggaaggagctactcttcaccgaacaactattatttgttgagtgtcatttgcatatggcatgccatttaatgcaatttggaggacagccctgagaggctgtgtacagagggaactcccaagactcaataggacgaagaaggtgcccccagtgtcaactggaaggcaggggactgaaactcaaacctggacttgaggcagcttgagggattgaggcaatatttaggtttagaaatggagaggtcaagatgaagggcagtgaattctcccctagaagcttaaaaagaaattccgataatctacagagaagaagctagtgctgatctatccaatatggctgccatgagccacgtagggctatttaaactaataaaaattaaatgaaatttaaaatttagctcctccgtcacactacccactttcaagaactcagagaccacatgtggccactggctgccatttgcatagagcaggtatggaggcctcttcacttccatcatcacagaaacttctattgttgcgcactggtgtagggactagggaaaagtttcttttctgtgtctaaatattccaagaaaaattagaaatgaaattttcaattttcaaatgaaaaattcaatcttaatatttgggttgcttaagcctgaggataaaacctaagttctgggctcctgtgagaaagactacacagccctaagaaaaaattcaagggaaaaagagcaccagaaccccaaaactcccatggtaaatgtagaaccttaagaaaacaatctagcactcttaagaaagagtacacttccactgcaggctttcttcttttaacctcttagtggattgtctgatgaaataatcatgttcagatatatatatatatcgtgttcagatatatatatatatagtgttcatatatatatatagtgttcagatatatatatatcgtgttcagagatatatatatatagtgttcagatatatatatatatatagtgttcagatatatatatatgtattgtgttcagatatatatatatataaaatcccaggatcagcttgattctgggcactgatttctatacgaatttttggatgcccaagtccacacagcaaagttacagccctgataaacacctaaagtagtattgcaaattactttcttaaagaaaggaaatgaaggtaaaaagtatgttgttagaattccatttgattgcatataaaagagaacttaaataagtgacttaaacaaggggtacctatttccttttcatctaaaagatgtctagagaagagcaaacctgggctggcaagggcacatagtcactgagaacccaggctccttctgtttttctgcttttcattcttagcatgagatttcttagagtcgtaggtctcctcgtcgtccagaatggctgctggagctccagccatcataacttattccaggcaggagaaagaagcaagggaattggcaatgagagaaagggcgcacttctcagctgagccaacttgactttaagaagcctacagagcagccccatgcaatgaccctgccttacatctcatgagccagctctacctgcagggattccagagataaagtcatttaactgaaagaaagaaaggaggaaacgaaggagggagggaggggagatattggataggtaacccacagtcacacacggtacaaagtgtagctactttgcctgcaaacacctaggagcagacaggaaattcattctgctcaatggtggtaaagggcagggtctcagccaccaatccctacggagccaggtgtgacagcagggagtggtggggattgcggcaacctggagggtccatgcctgtgcctgtctccaggagcctctgctcatcactctggctgattgttggaaccagacctactgatcccaatttcttgttgtttttttttttgtttgtttgtttgttttaaagagcatcaggcaatctagattgtagagtgtgatctcttcgtttttaaacgctgctttcgcagctactaaaaaaaatttttaaacaatgtgggtgacaaataaaatcagcaggatttgacccagagtgaggggtggggctgtttcctgtttataatcctctgattataaacaggaaaataaaataactgcacctcatgggattatctgatgaaatgtgtgtatcacttgtcaagcgggaagagagatgattcaccaaacacagtgaaacccactgaggttgaaagatgtttgagactgggtggctgcgggggcggccaagcgaggggtccctgggccccccactcagccctccttgtctgctatcaccacccacatctcccaacctccctagaggtgctggggccaggccacgtgaagagggggtgaaggtggagggttgcaccaaatcatttcatgagtgcctcgggtgagggcgaaacctgatcaagtcccggcctgcgctcccacagccagcgccttctcccacattcggggtgtattcctttggggatgagccaggtctcaacccaggggtctgggatctcagggcccacaacccacacagaatcggaggtcagccggcctgacctggaggagaaagttctagagaagggggttcagggttccggctctctggctctcacagctgaggccaaaacgtcaggcgccacaccagtatctcggcttgccatttcgtcaccagctgaatgccagtcgcaaacacaacccagtctgttgtgagcacaaagagtgttcgggataaccctgctgcctgctgtgtggacacagcttcccgccagcatcaaggcagctcaacaaacaaggctagggaatgcgcccccaacagaggtccactgtctgccccgacgcccgccttccagggagagcattccagtagctgacctaaccttctgggcattggcagaactcccaagaaccaattgcgggcggttctctacccatcgtgaccaaccgtcctcgtttgcctgggactgagggggttcccaggctgtgagacaatttttttttttttttttttgagacagagtctcgctctgtcacccaggctggagtgcagtggtgcgaaatcggctcactgcaacctccgcctcccaggttcaagcgattctcctgtctcagaactgggatgggttcgcccttcaatctccaccattgctttccacagacagcctcatttccagggatggggaaggaaaacctgtaactgcctgcaaaggggttagagagtgctggtgtcttctcagggaaggctgaacaccacccttctcaggaaagacttagaatcggtccaacctacagaaaaccaccagcagccacggggcaagagttttacacccaaccgaaaataaacagtcagtaccctcatgggagaatctcactttagaggtatttattttttaaagttgcttttgtttaagatcattcccacttgggctgaattttcctcttgttcttggcacaaggtgcaaggaagtctatgtagcataatcccaagtgggtttagaaacaaaacagaactggagatgggtaatcatgtgctcgtgtacgcagagtgcagggccacacacacccgtaaacagcaggccctctgcagagggggattggggaactcgggggcagcagacctttatgttagactgtcctgtcttgcttacctttgttcaccaatttttgagaccggaaagctataaagcagaactgaaatttcttaaaacgtaacactcttcttactgaatgctcagcaggcattcgcgagaatgggtgctgaacaggtgggatatattggtcagtgaagaaagcaggttgcagcatggaatatagaggataattgcaagtcaaaaaaacagatctactggttgcagatatttgtacacgtgtagaagaaagtctggaagagttcacaccaagacctgaactgatgtttatacctgggagagggaacatgaaggcataaacttgtaattctaaatccaccctcttctgtttgggttaactttcttcatccagagaacacgtacttctttgtttttggttttttgtttttaaacagtatatcttgaatgtccaactaacagcaggtggccttccttttaataaaaacctaaggtgtggaaactccaaggttcacagatctgtaggaatgacagggttccttccaatgggccatctctctggtgcaaaatgggacacattttacacaccttttcaagaacaaatcccttgtgtaattaattaagcctataattatagaccaatctttaaaaatgtaatttgtagtttccccgtaatacttatttcaaatctgacttctgatgtgggctaaattatattggaaccaatttttactacgtggagactcaggataaaccaggcttcatttgattgatttaaatatattgtggtttccatgtttattactcagtagtaactggtatttatggagccaggctgcataccagaccctggacatgggactccgcagttaattttttttttttttttttttgcctggatttgatatcccaaagcagttcatttcatttaaacctcacagcaaccttctgggggcacttactgctcttactcttttaagggaacaaagactcctgagaggaaactgatgtacccaaaaagcaaaaggcaagggctggagccctgatctgaatctggggtctatgtcaaggtcacagtgcttggacagacacatttactttgtcctggtttttcttaattccttattcactgtttctcttccttcttagggtcaacagtgttacacgacacgtttctgcttgtggcatttgaaaaaatctctggattagagtaggatcccctgcgtaggagtcaaagatgtgaggatttttaaaaagagagacatggggtttgacctctcccagccacctctttccaaacagctcttgggtgaccaggtgcacggtcaatgagcgggtctgacggtccatctgctcttttgtcttgtgggaagaaaggatgactcaagtcctctgcactctggtgtgtctgtagttgtggattctctcctggctgtttaaagtataggcacaccttggagatactgtgagtttggctccagaccacagctataaagtgaatatggcactaaagtgagtcatgagcaatttttggtttcccagcgcataaaaagttatattcacaccaggctatagtctaagtgtgtaatagcattatgtctaaaaagacaatgtacataccttaatttaattaatttgtttttaaaattattattgttattattattgagaccgagtctcactctatcacccagactggagtgcagtggcgcaatctcagctcactgcaacttctgtttcccaggttcaagcgattctcctgcctcagcctcccaagtaacaggcacccactactgcgcccaacccgtttttttgtatttttagtagagacagggtttcaccaagttggccaggccagtcttgacctcctgacctcaagtgatccaccggccttggcctcccaaagtgatgggattataggcgcgagccaccctgccgggccaattttaaactactttactgctaaaaaatgctaacaatggtctgagcttccagacaatctttttgctggtgaagagtcttgcctcaatattggtggctgccgactgatcagggtggcagttgctgaaggttggggccactgtggcaatttcctcaagacaacgacaaagttggccacattgattgacccttcctttcacaaaatatttctctgtagcatgcagtgctgttggatagcattttatccacatagaacttctttcaaaattggagtcaatcttctctaaccctgctgctgcattatcaaatgagttgatccactatcctcaatcttttgttgtcatttccacaatgtttgcagcatcttcaccaggagtagattctatatcaagaaaccacctttttttttttttttttaaagacagaatctcgctctgtcacctaggctggagtacagtgtacactggagcaatctccactcactgcaaccctcacctcccaagttcaagtgattctcctgcctcagcctccgagtagctgggattacaggcgtgcaccaccacaccccgctaattttcgtatttttattagagatggggtttcaccactttgtccaggctggtcttgaactcctgacctcaggcgatccacacacctcagcctcccaaaatgctgggattacaggcatgagctatctcacccagcctcaaaaaatcccccccccttttttttttttttgcttatctataagaagcaactcctcagctgttcaaatttcatcatgagattgcggcaatttggtcgcatcttcaggctccactcctaattccagttctcttgctatttccatcatatctgcaattgcttcctctgctgaaatcttgaacccctcagagtcacccatgaggactgtgatcagcttcttccaaactcttgttaatgtggatattttgacctcccatcaatcataaatgttcttaatgacatctaaagtggtgattcctttctaaaaggttttcaatttactttgccaagatccatccaaggaatcaccatacatggcaggtatagccttatgaaatgtgttttttaaacaagacgacttgaaaatcaaaattactccttgatccatgggctgcagaatggatgttgtgttagcaggcatgaaaacatcatttatctccttgtgcgtctccatcagagcacttgggtgaccgggtgcactgcgaatgaacaaatattgtgaaaaaaaccttttttccctgcaattggtttcaacagtggcctggaaatattcagtaaaccaagctgtaaacagaggtatggtcatccaggctttgttgttccattgctagagcacaggcagaatagatttagcataattcttaagggccatatgattttcagaacggtaaataagcattgtcttcagtgcaaaatcaacagctgcattagcccctaaaaagagagtcagcctgtcctttgaagcttggaacacaggaattgagttctcctttctagctatgaaagttctagatggcatcttccaatggaatgctgttccatctgcattgaaaatctgttttttagtgtggccaccttccccagtgatcttagctggatcttctggagaacttgctgctgcctctccatcagcacttgctcctttaccttacacttttatgttacagaaatggcttctttccttaaacctcataaaccaacctctgctagcttccaacttttcctctgcagcttcctcacctctgtcaaccttcacagaattgaagagagctagagtcttgctctgaattagcaatccttgggcttaacagaatgttatgtatggttgatcttctacccagactactcaaactttctccatatcagcaataaggctgtttcactttctttttatacatgtgttcacggaaaagttcatttccttcgagaacttttcctttacatttacaacttggctaactgtttaccacaagaggcttagcgtttgacctgtctcagcttttgacatgcctttctcactaagcttaatcatttctagctcttgatttaaattgagaaaactttgggaggctgaggtatgagaattgcttgagcccgggagttcaagaccagcctgggcaacctagtgagatttcatctctactaaaaaaaagatttttttaaaaaattagccgggcatggtggtgcttgcctgtagccccagctactcaggaggctgaggtgggaggatcatttgaggccaggagttccaggctgcagtaagccataattgcaccactgcactccagcctggaccacagagagagaccctgtttcaaaaaatacataaataaataataaagtgagagacatgcgactcttcctttcacttgaacacttggaggccaatgtaggtttcttaattggcccaatttaacattgttgcatctcagggaatagggaggcatgaggagagggaggagatgggggaatggccagtggagcagttagggcacacacatttatcaattaagttcactgtcttatacgggcacagttcgtggtgccccaaaacactgcaatagtaacatcaaagatcactgaccacagatcacgataacaaatataataataatgaaatgattagctctattgtgagaactgccaaaatgcaacacagagacaccaggtgagcacctgctgttggaaaaatggcaccatgaaccttgctggaggcagagttgccacaaaaccttcaatctgtaaaaaatgcaataaagcaaattgcaataaagaaggtatgcctgtataaatgtaatgctgggagacacaaactctttttcagaatattagaaaggaaccatctcaggacagaggcaatggggaagtgggtggggtgcgggtgagcagggctgtgaagtcttgagatttgcctctgcggttgctgacagagaacgagttattattattattattattattattattattattatttgagacagagtctcactctgtcgctcaggctgaagtgtagtgacacaaagtcagctcactgcaatctccacctcccaggttcaagcaacttcaccgtggagacagttttcttattaaattgcttgtactctcttagaaggattactcatttgatcagcgggaggaaccactcccaaaataccttttgagtcatttggggtttctattgccttttgcataaactttgaattattctttttgttgaaaaggttactattaggaaacacgttcacaggcagtctgtaaatgtcatcatatttcagctggggacagagctacacgagggtttggaggaggcggctcagggagaaggcagcacctcagcctgttctctcaatgcactggctgcaaggagcagctgcaacccagagcccactgggcccagacacctagctgccacatttccaggggtgggcctgctcatgacgcaggcaagacaggaaaaccgggacaagctcctgaccaggcagaggtcagggacagctgctcaggtgccaccaagcatgaggcagggcaccacccaaggcttcctgcccaaacctgtggcatgccctgttggtgctttgctgaaactgtccttctctaagaaggcaatgaagacagttgtcccaggccccaaaaagaagcactcactccctttcccatgagaccaccagtttcggatagagattctgtttggctggcgttctcaactcattagaattggaattaaagagcagggatgggaagtgacattacaaactccgatgcccaggccccatccccgactaactgaatcagaaatgctgggaggcgagctcaggacattatgtttttaaaacgcaccaggtgaggctgacacgcagccagggctcagaaccatggatttcagccaaaaaggctttagcccaagaagaccgtgcaaatacaaaatgccaaagggagggtcatcaggtgagtttcatagaattctgattctcctcctaataaagtacgtccctggtagctgagagatgggagagcagctccacatgtgggacctgccagggggattcggcattcctgcggccccctctgctggccatgatgctctcagattctttgctgaaagggaacggacataggagccatcccactaaactcttcaaaggacgcttctcagatgccggagtccacagagtagggcaacatacaaagcaagcacccaaaacactgggggtgagagtctcaaaccttgtactctgtaattacatccagcatcaccatcacttctcaaaagagaagacactttcccagcaaaaatagaaaaggaaagcagttgcagaatagttaagactgagccctgagacatcagtttagccttgagaaaaaaactacttccattgtccacatttttcttagctggattcctaccaatgaacccctgctgggacttgagtttggggggcactgagtgaagtaagaacttttagttaagaaattattctttggccgtggttgtaatatcgtagtcagggatggcttcacgggcatgtgtccagggccccacacttagaagcatcctgccctgggtttaatgctctcttgaaattcttcataatttttggacaaggaactccgccttttcattctgtactgggccctgcaaattctgtacccaaccctgattttcactggtggatttatgtaaacgtgtgtctttcagttagtcaataaatatgtcttggacacttatcggtgccggtttccgaggacacaccatgtgcagtatcgctgagggcaggatccagagtgtgcctgcctcagaaagctttgcttctggaggggccacagggaaaatgttcaccaataggaaagcctataaataagatcattgaaaagattgggaatctgacaaggatatctatgtgaaacaggagagttccctgaacccccttgcaggatgtgcaacaagggtacggctcatgtgtgtgctcaaaccccttacaggagggagagcacgcagacaggcaggtgcaggagatagggtgagcacccctgggctccagccccacaacagcatccaggaggtgggatcctgtgactcccgaagcccaagtaggcgtgtgttacagtgtgctcttttagccttgccatccatggagggcttaagtgttaaccagctcagtcttggtacacaggtccttgtccagcattcaggaagaatcaggtcacacatggacttgaaggatggtgaatgcagggattttatttggtgctggaggtggctctcagcaggacagatggggacctggaaagggaatggcgtgggaagatgatctttccctggagtttggctgtccctgggccgatctctctgactgtccccagcagacgttcagacgctccttctcttctctcctcctccaccactccattcttctgctcatctgctcgtggaacctgggtttggggtttatatgggtacaggatagggggccatggcaggccaaaaggcaacatttgggcatgaaaacaggagtgcctgttcccatttagggttgcaggtttccaggctttggggcggggcctctgccagggagctgccctcttccacccagtatttccctgtctcttgtctgtgtcacatggaggctataaaatgggtaaagtgtggcaggtggcagcaggtagcagaggcccaagaagcctttttgaaggagatgacatgggagctgggactggcaggaagaggaagccattatttaaagaacaaagcaaaagcggccgggtgaaggtgcatgtgggaggctggcagcaggtaggccatgggggaatgtgggttttgtttacaaagaagagtagagaggggtcactgaaaccatttaattggggaatcataaggtgaggggacatttagggcaataaagagccagtggcagctggcagaccaagggggcacgtggcagctgttcagccaaggtggaagacgcttggcctagactagggtttctccactgggcactactgaaatttgagccaggtaagtcttcactgtggggccgtcctgtgcaatgtaggatgttgagctgcatccctggcttctcctcaccaaacaccagtgggtcccctccccctgagctgtgacagccagaactctctgcagacattgtcaaatgttccttgggcatcaaaatggaccctggttgaagatcactggcttggggtgatgagagtggacagggagagagggaataaagtcaggatgtatcttggaaataggactgagagaattaaaactgatgggttgaattgggggaagggtattaaggggaaaactgactctgttttccaactggaaacatgatgaacagtagcaaaacgtaatgaacagcagcagcatctgtgctgagatctgctcggggcatgaggagcagtgtgggtatcagggagagatcattaccaagaattccatttcagccaaatagatttgctttcttctaatcagacaaaaacttcccaccacacagctgctgggatgatccaactctagcagacagtgttgactggctattagggctgccagaaagaatacaatatgcccagttaaattcaaattctagcttaacagtgaataagttttagtataagtataccgcctcaccccactactaggcttcctcctagcagcagcaggcaaatcggctcaattaggccttcacccctgcccccaaaactgcatgggacgtatgccaaaaagtatttgttatttatctgaattcagatttaactgggcgtctacaacatttttgggtttttgttttagttttctagggggaaggcggggatggggctttgctctgttgctcaagctggagtgcagtggcgtgattacatctgcggcagccttgactgccccgagtcaagcaattctcccacctcagcctcctgagtagctgggaccaaaggtgtgcactgcctcgcccggctaattttaaaaaatgatttgtatagacgaggtctccttatgttgcccaggctggtctcaaactcctgggcttaagggatcctcccaccttggcttccgaaagtgttgggattataggcaagagtcaccaggcctggtccacaacatttttatttacatatttttgctgtatctgaagccctgtcacttacctgtctttatcctattttggttcagttatctggaatccatgggcttcgggggtggctcagttcaacagtgaaacttgattggtccaaggtggtcatagtaattccatttcttgctagtgattggcttaggtaaagaggatgtgacacaatgttagccaataagagttgacagaacatctggaagctgggagctttggggaagttttttcttaccactcttaagcgggctcatgaagaagacactgctctccctccttctgtgttggtatgaagatattatgtgtggagctctggcagccaccttgcaaccacaagcaaagcctgaggatgaggacaatttggggagtatggcagggctgaaagttgtggtcttagtagcaccactgaacctccaaatctgcccgtccttgagccactgactccttttcgggcttcatgttggtgaggtaacaaattccttattattggagccattggagatggttcttctgtgtcttgctgccaagcacatcctgactgctacgtcagccagccactgtgccacaggagccatgaggctaggttttgccacgggagataccgaacacaagggaagaggctacaggatgatgagtgaatagctggattagagcttcctagcatctcagcctcacactctgacaacatcaaagaaacatctttcttgacacttctcctcttcctgtttcattcacattgagagaaaattctctatggtgtctcccatttctgcacatcttgtgagcagaggcactgacagcttttcttctatactgtctttacaagaaaacaacttagtagacagaaaagtgtctccctctggggcagcagccagatttgtttgccgttgtttacaaagttgatgtctccctccagggcaaaggctgatcatgtttgcttgcccatcatcaatgatttggattttctaagctcaagattcctcagctgtggaatcgccacatccagctgaggacagccctcagcctcagcggctctcagactccccagggaccctggctcccaccatgccccagatggcccctgggctgttgagtgaccatggagggccacccctttgtatcaggggtttggatttaattaaagtcttagaaaatattatctgtcactgagcagcccagaagggtagccctgctcagaactgagaagcttcttcatgtggctctcgaagctgtcaaacaggccctctgcaaactgagactgaggccgtgtcaaatgcttgtggtttacctcgggctttgttatgtcccagagtctggaatcctggtaattacagaaaaacgtcgggtggggggtgaagggaaggcgtcagaaagttatctgtctcaacaaaaggaagagaggagagggaaagaaagggagagagagacagacagagagaagagagagaaagagacagagagagagacagggggaccaaggctgcacgctgtgagcaaagattctcaaaggaaaatcagagcagtcctgtcggaagggaggatggagctggcctggctaatgaacaaacagagcgaaacagtcccacaaaacagatagctactacaccatgctttccaatgttgagagcgccgatgaagatcatcacgttcaaaaagcaggtcaccaagcagaatgtaagcatgtatttcatttttcaaaaaagaaacacccattctataccagtctatcaactgtgatgctctgcggatgagtcacagtagaggttttaaaacaattttctgttggtctgcctgcatctgctaattttcctacaatgggcatattctagcagttcccatgtcatgaacccaccaaaggaataaataaaagacagaaaactgagcagacacgcagatcctcccaaaccctttctccttgttaagttctgtctgcacaacaaagaccagtggagaaatgaaaagctgcagtcagttttctgactttgctggctgggagaagcgatctggactcatcttttccaggtgtttgggaacatggctctgtccctgggtgaggaaacctcaatttcaggctgctgatcacaagtgcaccttccgtgacaatctccttagggctgcactttcagggaaggaataacatcagggctgcagcccacacgggtcgtacccttggcagaacctcctggaggccctgccggggttcctggggtcccagggatggagacatccctttgtttcctgtttagggtggttctgattacagatgaggccaaactggaataaatcacaaccagacctcctctagccagtggctcagggctctgttgattacagtatcattagcaggaaggaagagttaacagggaagacacaagctgatgtggcttggatgttgtcccctctaaatctcatgttgaattgtgatccctagtgttggaggtagggtccagtgggaggttttttggtcctgggggcgatccttcctagcagatgctgccctcatggtagtgagtgagttctcacaagatctggttgtttaaaagtgtgtgacacctccccccacttctctcttgctcctgctctgacctgtgatacacaggctgtcccttcaccttctgccaggactgtaagcagctcaaggcctccccagaggccaaggagatgctggcatcacacttcctgtacagcctacagaactgtgagccagttaaacctcttttctttgtaaattacccagcctcagggattcctttatagcaacacaagaaagccctcataacagccttgggcttcagtaagggctccaaagacaggcagatgtgaattccaccccaggaaaaaagtcctcctggctgggggacctaggacaagtgtcttcacctctgagactcagtttccacccctggaagacggggatggtaagtgtattagtcagagttctccagagaaacagagcaatagaagatatatatatatatgtatatatatatatgtatgaagaggaattggcttacatagatacgggggctgagaagccctgctatctgccatctgcaagctggagacccaggaggatctgggataattcagcccaagtctgaaggcctgagaacctggggagctgatgttgcaaatcctagtccaagggcgagagaggatgagctgagatgtcccagctccatttggtagacaggaagcaaaagggtgaagccctcttctctctgccttttgttctatacaggcccttaaacaatttggacaaggcccacccacattggggagggccatctgctttgctaagtgaaccaattcaaatgttaatcccatttggaaaccctcttaccaacacaccaagaatcatgtttaatctgggcattaattgtggcccaatcaagttgacacgtaaaattactgtggtggaaggaagtctccctcattggcaggatgaggggagatgagtgtgggagtggcacacaagttcttcacctgtggcagcctttctcatgtgacagagtaaagatgaggcatttaccaacaacccctcctttgctggccaaaggggcgttagtccagttcaaccatcactttgtctcctgccctctggggagactcactctctatcaaaccctttgggttcttggacctcctttctgggatgccagaaggtcaagaaagcctggatttgatggaaggacagagaaaggctttaaagagactgattaagacaatctacaaaataaagagctgagagagaaaagagtgggcagaaaaggtaaaattttcctgcaggatgggggagggaaatggcactggagatgaggaaagaagacacttagggaacataagtgtcagacaatgggagaataaggaaaaggggatctgaaaaaagtggcaggaagtcaagcattggggaactttgagtgatctaggattctttcgttgcaagcaacagcaatcagtcctggctgactttagaaaaagggaattcactggaagcatcacagaactgagggcaggctgcagatgtgggactgagaatgagtaggagcaaggcaggctgcaggctatgaggcaggtagcagaaacagtctgatcaaggtgcagtttctgcgatggaatgaaacaccaacaatgtcagcctctttgtccctttgcttgagactcaggttccaaagtgggctatctgactgacttggtgtggttcatgtgcctacttctgtctgtcttgtgtggaggggaggggtgctgtaagcccagtgccctatctgtaaatggaggagggcaagcccttgaatcaaaactgtcatggttatgaaggggaaatggggccaggcaaccaaacatgatgaatttccattacgctctttatgttcttttgaaagtagcaaatggaggtgctttcaaacatcgttctggctgcagaactgtgcatcttgcacacatcacttctccaaggtcttggtcattgaccctcatgggtcacagcttccttaaggttactttattattagaaatacataaactggagagtcttgtgatagacaggtgaataaaatgtcataggaatgcagaagaggcaacctgaggaagccggggaaggcttcactgaggaggtgacttttgggcatgcttatagaagtttacagggctaagcagctgataggtagtaggtggtaataaatgcatctcaatacttatttgagataaatcaatcttaagcaaagcatgtaggattgaagccaatccccttcttcctaggaatctgggacaagactgtcttgtaacttgtagcttcacctaacccagatacttctggttataactgcaggcttttatggacaatttcactttttcttttaaataactttcatcaagaccaatgacactatttgacattaagtcaaatcgtgcagagaaaaactggggcaaaagtcttattttgtaatttgtcagaatgggttctgaaaagctgtgcttgctcccaagggtttcctgcaggcgaaaaggaaacttccctaagacagaagagggaatccaccatttggccccggatggatggtctcagccacaggacaggaacaaggacaggaatctgctcacaggtccccgcccagctgctctctgaccggccacagtattcaggccaagacactcagctgtgactgcgaatgctacttgtctgacctaaggatctaaggactgtagctgccttgtttgcatttcttactccaacgataactcaaagaaaagaaaatgaatcaccgtggaaaatgaggggagggtgcaaaagtagtgccgcagagcctcagaatcctcccacctgccctccacctgcatctccaccagcccattctcacccttccccacatcgcaggagaggaaccgcccagtttccgggaagacagggtcacttggtttagctggagtggtcccactcttcctaagtacctggtcttcacagtagctgctgtggcagggaaggacgcaatcccaggactagactcttatcttctccttttgcccaggccccaccagcttccacactgaacaacacggggcctgtggatccatcctcatcccctccctaagctactgacccactcccctccccctcctggcattgatgggctgtcctcagggaagccagtgaccctagtccagggcctcagaccagggtcaaggggcagaatgtctacaccaggccagggatccctgcagactggtcttcgggaagtgcacccccagatgcaatcagttcacagaggaaaaccacattttgtttagtcttttcctagtctagaaggcctagtatttaataaaccctggagccagccctgagggggactggcttttatgggctccaggcagctctctcagcctcttcccaggtgggggggcttggcctgttggcagctgacttgagttttcttcccagccccacctcgcccaatgcccccaccttttccatgagatgaagagaaacttggcctccaagggtcactcttctccccaggaatgtgtggcccagcttctccagtttaaaagactttcctctgctccagggctgaccccaaacagatgggaacctctagagcttggttggccaatgccatgttcagcccagtcacagctgagatcttgtcacctaggtgagtgctttactgctggagaagtagcaatcaagagaacagttctttttaacatggacatgagagattttagggaccagtccccagtgctcaaatcatagcaggtcccacccaagaacttggctcatccacaaaccaagctcctgccaagccctggcttatggagatggaccagacattcctggggcatcatggcaggcggccactgatgctgtctcaaatcctggggttccatattacggagagaatcagctgcaaaaggcaacaattgtctttgagtcacccctgcccttccaaaaatcaggctttcaagagttgaaggcgtgaagcgtaatgcagggaatttctgacagtgcagagggtatctgacaggctgggatgttccagcgatgactgaacacgcagattgaatggaacactgattacattcttggttagccgcctatatagcccatactgggtcctcattacatgtgccctaacaacaaacattatgtttcattaaaatattacacacttaggaaaatacttctaaaaatgcaaagaggagaataaaaactaccgcaagtgctatactgagacccagcgctgtggcaagttcccctgacctgtctgcagggatcattacaagccgatactggctgcccagcgggacctgatgagacatcagagagctcacgtgacctccattatcactgtcaccgccgtgcgtgctgttcacacaaacatcggagatgtaagtgacactttacaacaattcctgagccttccatcatgtggctcagaatgtcatggcccagatgatgtcggggggtattaaaacaaataaatgaaccatcgaacaagtaaataaataaatacacaaaggaaagcggggagagagagggaaggaaccggttagggcactcacacagtgcagaggagtctgaaaaggaatgctgcctgctggcgccctggctctctgtctctctccctgtctttctgtctctgtgtgtgtttttcctcactctctgtctctctcgccatctagctgtctctcctctctcggccctttctcatcataaacccccttacatgtgatctcctttaatcctcacaacagcctgatgtagtcactggctttcctcctattttacagctgagaaaactggagctctgagagatggactaccttgctccaagacacacaggtgaatcctagtggagctggagtcagccccagatagctctatgcccaccctccacctccccctccagcctgtgtgtgcacgtatgtgcgggtgtgttgatgggaatataccctaagtcagattgcaacttgcaatctacagctcacggaccagaaaccttagcatttcctgggagctctgtagaaatgcggtgtcccagacccctccccagacctcccaagtcagaaactgcattttcacaggatcccttgggaactcctgggcatgtgacaggctaagaaacacctctctacatctctctacagcccttctcccactgccaggcaggactgagttactgctttcctgagaggagggaactacatcactccccaaaaggaaactggagaccacgctaggcgagcacagctttcctgaatgccagcataccagggctggaggtgcaggtttggtgctgcctccgtcaccctaagccctcaacatctccatcccctggtctcttggtaaacagctaagccaagatggccagagctgggaggatgattgggctgagtcatgtcactgtagcccacagacaagtctgcaacccattaaagacttctcttctccattaatttcagagacaaagagacgtttgaagtttaatgtcattctcttgctcagccttcctcaatgaggcccccagaagggtgagtgaggggctctcggaaggagtggggctactgcagggctggctccagccgcagtgtgggagtacccaggtctttgcttggaacaaacacctatttgacagacagcagttgggtcctgggtagaaccattgagaccagctaccattcctggttctgaaatttaataatgaaataaatgtaatcacacatatttaattaagccatttcttaataatcattatcatagcatggcacactccccacacgcctggcatagcaaggcactatcatacgcatagaagcatagacctttgctgagagcgtcactccgtaccaaccccagactcagtagcggtgagaacttgcccaagtcaaaagcttccctgcggctcatttcctcctctgtagaacgggggactgaaaacaaggaacaggcatcgggacagcggatcatgaaactggtgccccatgcagtgggtactctaaaatacgaaggagcaggtttcgggtgcagcagcagcaaggatagagctgaaacacagatgcctaagggaaggacgccagacctggaagaggacaaacggggtgatcttgcttacataaagctcgaaaacaggccagaaggccagaaccaatctgcagccagaaagcagcaccacggccacccagggcagaaggaggtggggtcttcctggggtgaggggggccgtgttccacgtcttgttctgagtgtggaagggtgtacatgtttgccacaatgtatcaaatgccacccttaaactctgtgcatgttattgtatataatacttcaataacattattttaaaagtgttgaccaatagttcaaatacagtttgttgccaagacaagtttttaaaaaaccatgaaatctgagtataatacgattttaaaacagaattatacatactgtttgtagccaacactttttttaaaaaacatgtaatctgagcataataagattttaaagcagaattacacagcgttttacataagttaacatatttatggcacttggcacagtgcccggcacacaggaggaaaatgctggaaactgtcatttcatcatccggatcaccttgggttggtgcccttatacctgtttcacagatgaagaaactgaggcacggatagggtaacttacattagtttcccagggctgccgtaacaaattgcggttgtggtttaaaacaacagaaacttgttctctcgcatttttggaggctagaagccccaaatcaaggtgcccgcaggccaggctcttccacaggctctagaggaggacgctttctggccgcttccagcttccagtggctgctggtcatccttggtgttccttggcttttggacatatccttccaacctctgtgtcctgtgtcacgtggccttcttccctctgtgtgtctgtgtcctttcttttaaggacaccagtcactggatttagcacttactcgatccagtatgaccctatactaactagttacatctgcaaagaccccatttcccaataaggtcccattcacagggatcaggacttgaggatgtcttttcgggggacacgatccaacccaagcacttacccaagacagcacagagattaaatgggaggatggagatccgaggagatccaagcccagctctgcctgattccggagctcccctgtggtccaggaccctttaccttgctgtgctcacctggctgagaggcctctgcaactggccaggccctcaggaactgaattctgtcccggcctcgggtgctcagccgagcagtggaaactgggagagtaaccgagggcaacatgagcatgcttcagtgtttagcgcggatggctccagggaggtgccaggcgctgtctgggaacggggcaggggtcagggcagatgtcacccaaaaggacactagctctgaggtggaaggacaaggtgggttgtgtggggcccagaagagggcattccactttgcataagcaaagtcctgaaggggacactggtggcctggcctggtgggtgccggttaggagggatccaaagctgaatggtgagcaggcagcctcccgccagtgcatacacccctccctccacagcctacgctgaggcgtttgctttgaaattgttgccagtgaacgtgagtggctggaaggtgggtgttggcgttgggcgttggcattggggatgcctcgctccatcctggacatgtcaacatctcttcaagactcccctgcaacgtggggatggtgatcttcacttagccaacctcagaggggatttcaaggctctgagagggactctggcagcatctaggcttagagaagacaggaatatgtaaacagtggctatgcagaagagacctggggacgggaccttatttggaaacagggtctttgcagatataatcaaggtaagatgaagtcatagtgaaataggttgggcccaaatccagtatgactggtgtccttggaagaagagacacagagacatagacagacacagacatgcagagaaaacgtgatgtgatgatggaaactgagattggtgtgacatggctgcaagccaaggaatgccagtgattgcccagaagcccaggagcgtggagagaggctggaacagactctccctcagagcctccaaaagggaccaactttgacggttgctcaggatatacagtccctagtatatcctgggatgttgggatcactggatatactaggcaggtgtcagggagaggcttaggcaggagatggaaactgagaaatcttcaggacaggaagaggctggatgagctcacgagggagtgagtaaatatgcatagaacaaacagagatccaaggatgcaccctggggccctccagcgttcaggaacagcaaaggagacctcgaaggaacagccagagagaggtgaagaaggttaaccgtgactatctctgagctgttgaatgatggttgatttttccccttctgtaaccagcatttattacaatgagaatgtgttactttttataaacgtctaaaaactaattctttcttataaattgacttctttcatacacacccatgggattatcagctcagcacctcatctctaagaatagaaaaagaaccttcccaagaacccctcaccaccattaacttggtgtcagtagaagcagccatactgtgttatgattataacttcctggtttcctttgattggtccagagatgagcacaggattcaagttgaaccaatcagtatacttccctgggaaatactcttttgggacctacatggtagaatgtaaaccttggatgttgctgatggccatgagaagttaaagaatccaatcttttctagagagaagagaatgaggcagaggttcagagacaagaggtgcttgagtcctgattgctgggttcccttggcctggttgcatgctgcccttggagcattctgtcagattcccctgtatctgaagctggttcaggttgggtttctcttattcaagaccaataagcctggtaaacacagcaccagcccacgttcatccaagagttatgtagcacccaccaaatgctgggcaccagggataagatctatgtttttggcctccaggagtttacatttcagttgcacacagacctcctgcctcacagacttatggtttggccttggaggtccacaaagcacttccctccacattatctcttgatcttcagggcaacgctatgggatgactcagaagaagagactgagtttcaacagacctgtccgagtccacggctgcaaatgacaggctgcttttaccaaaagttctggattctttcgactgcctcctgacttctggaaacttcaaaaatatggaaacactttctcacatattatcttgggcttcccgacctctcaggcggtgctccctctcctgctgacgcctatgctgagccaaattctgtgccaaattccaggatcaggccgagtcagtacgtgctgactcaccaattgctggctgggcccgggttgcatcaggggagtagatatgcccagcttctcatcggcttcatggtcccctcccagaccccactcactaatcagcagtgtggaggtcacgccttcaccacacccagggattacagtcggagctgcctgtctagaccctgttccagctcctttgggtccctatgacccaggccctaatcatgaactgaaattgaaattggaacgcccattctctgctgcaagttgcaagctgaaaatcagcccaggtggttaggagtgtccaactggctaggttctcttaagtctcagagatagaggatctccccaggctgtgagaggaatggaagtggtcctagggagtctggctttaggaaggtgtgtcctgctctgtgagatctaggacagctaaccatcttgtccatctttgctagtggccctaccccatggagtgtcaccatcaaacccatcaaactctctgctctcatggagctctcactggagctgggggtcacaggaaataacacaatgacgcatttcaccaaaagctatgaagacaacaaagccaaggagtgtggaaaagaatggttgggaagagggccagtgtggatttagtggtcagggaaagtttcctggaggcaatggtttagatcatgagatctaaataacaagaggagccggacttgtggccatctacaggaagagcatctaggcaaggggggttgcaagtgcaaagaccctgcagtgggagggagctcagagtgttgagccatgagcagctccacgtggctgggatgagggagcccaggaaccattcagggagatgacgctggagagacagagaggagaggccaaatgatgcacggcttggaggcccagggaaggagactgggcttcattctgagacaatgagaagctactggaagatttcagcacagggtgacagtggccatgccaactcccctgggaagactaaaaccgagggcccggagagggaccacattcccaccaaaagttgttattttctgggctttttaatagtagccattctaatcgatgtgaggtgatatctcactgtggtttttgatttgcatttctctgatgagtagtgatgttgaagcatcttttcatgtatttcttggtcatttgtatattatgtttacggaaatgtctattcaagtcttttgcccactttaaaatcaggttacatgatttttgttgctgagttgtagttctttttatatttagatactaacgtcttatcagatatatggtttacaaatatattctcttattctgcctcttattaccttttctcttattaccttttctgattgtgtcctttgaggaaaaagtttttaactttaaattagtctcatttgtgtatttttgctttttttgtctgtgcttgtagtgtcatatccaagaccaaattcgtgtcatgaggattgcccccctaagttttttctaggagttttaaacatttgggttttttgtttagatatataatccctttaatttttatacacagtctaagataaagacccaacttcattcttttgcacttggatatccagttttcccaacacaatttgttgaagagactgtccttttcccattgaatgggcttagcatcctgttgaagatcagttgagtatacatataaaggtttatttctagactgtttattccattccatttgtttatgtaactgtctttatgccagtaccacactgttttgattactgtggctttgtaatatgttatgaaatcgggaagtgtgagtcatccaactctgttatttttcttcaaagctttttggctattcagattcctttgagattccacaggaattttagggtgttttttttagttttgcaaaacatgccatggggcattttgataaggatggcactgaatctgtaggtgacatcttaagaatttaagtcttccaatacatgagcatgggatgttataccattcctttgtgtcttctttaatttcttgtgcaatgttttatagttttcagtgtacaagtcttttacctccttggttaggtttattcttaatatttattctttttgatactattgtaaatggaattttttaaaaaattccttttctaaatgttcattgataatgtatagaaatgcaactgatttctgtgtgttaattttgcatcctgaaacctcactgaatttatttatcagttctaacagctttttttgtggaatccttatggttgtttacatatgagattatgtcctctgtaaacaggaacaattttatttcttcctctctgatttgaatgctttttatttcttttccttgcctaagtgctctggctagaacttccaatactatgttaaacagaagtagcaagaaaggcatatttgccctgttcttgattttggagaaaaaggtttcagtctttcaatgttggttatggtgttagctgtgggctttttagctatagcctttattgtgttgaagtagttttcttctattcctagtttattaagtatctttatcatgaaaggatgttaaatttgtcaaatgcttttctgcatcatttgagatgattagggtttttttttccccttcattctgttaatgtggtgtatcacactgatttattttcatatgttgagccatccttgcattccaggaacaaattccatttggtcatgatgtataatcattttactatactgttgaattcagtttgctggtattttgttgaggataattacttcaatattcatcagcgacatgaatctctagttttctttccttgtagtgtctttgtctggcttggtatcagagtaatgctgacctcatagaatgagcttggaagtgtactctcctcttcaattttttggaggagtttaaaaaggattggcagtaattcttcaagtgtttgccagaatgctccagtgaagtcatctggacttgggcatttttgttgctgggaggttttttattactgatccaaaatccttactaatattagtctgttcaggttttctattccttcatgattcaatctatgtagcttgtgtgtttctaggaatttatttatgaaaatcacaggaagtagcagattattcatttctactaagttatccaactcgttggcatagaatgcatattttaaacaactagcaaacttgttgaaaatgcacattcttgagttcccccaagaatgttgactcataggtatccactggggtctggtggggggatagtgcattttgaagctctccatccaggggattctgactttccctgagcagcagagaatatctccctggccccttaagaacagaaatcatgctgtgcctgcctcccccttccttccctgcttagtcatacctcttccaccttagatctgagtcctcagacccctggcagcccacagccacaaagtcatgtttttgttactttgtcccagttttcccctctgacttagacttaaaatctgctgaattatccagaactccaactatcctagggctcaaataacctggaatgttttttcacactcctttcccattgatctggaaagtctgagggtttcctatgtaccttggggattctcaagagggagggatgcttagtgtcaccccggtatggtgtgtgtggatttttaccctgccaacttttaatcctgtggaatcaagcatgggttcctggcacagtggcaatttaggaaatttgtgtatccatttaatcagagcactgtgtgcagagagaggccaaatttagggccaagttgagaataaggggaataagtttgctttctgagtttttctcactagtctctccagagagagactctcctctgtcccctcctgctttacaacccaatgtctgcccattggcacccatcacttcctgaattcttagttcttcattttgtcattacctgtttcccacactggagtgtacacctccatgggggcagggaacacacctgtcttgttcaccagtgtattctcagcactatcccagggcctggtgcatagtatatgctcaataaatgtgtgttgaatgaggatacagtgagcaaatgcacagcttttggtttttgttccccttcactgagcttcccattgaagctggtagggcacctttggcaaaagccatcctagtgctccagagagacagaaggtgtcttcatctggcttagcttccattttctcaactaaaaaatggaagcaataaaatataccttgtaggggtcttgtgagggtcaaaggagatctcatcagtaaaaagtccaacaagtgacagatactggaagctgttgtcaaagtgaatgaatgaataaataaataaatctgaaagacaaaagcctcattgtaagcagtcagtcactctggacagtctaatgctttcagccccaccttctggctgctccaaggaatagaaggatcatggatgttccagcattctggccccttggaggtcatctgccacatgttgttccatgaaatgggccaggtcagatatgagtcacctgccaaggatgccaagtccagtggatacctctccagcaaccaaacatctacatgatccaagaggctagctcagaggctgggggatgctgcttgagatattttgcagagcatcttcaggaaaatgtcaagctgctgtgccctcagagtgctctctgctcctaggtgaaatattacagcatgggccagtgttgttgttagctctccaatcaagccatgagtacactcaccttggagcctttgcatgtgacattcttcctgcctgggacacacttcccatgacctcagcttaaatgtagcctcctccaggaagcattcattgatccctccagccccaggctgaatcagggcccctgtgcatcccataccacaggtttctaactgcctggggacctgaagagccgagcctcccttcaattatgagaactgttggtgccatcatgagggtcactgcgagatccaggctctggggtcaggcacccctgagagtgaatccctgcccatcacttcccacctgggagatgctgggtaccaccctgacctctccaagcctcagtctcctctcaaatggggcaggtgatttctacctgggatgtacacaagatgccaccaagcatcaaagcctcagcagcacctggcacacatgtgtcctgttcatcctgtaggcaggatcacagacagcaaggcacccgtcacccactcctgccctggaacttcagcttcatgaaatctagattcttggggctaacgctggtgaatttttaaaagatgcaacaagcctagatttactaaatgtgaagttccagggtgggatctggagtgtgtgcacatttgaggggagttcccaccgggagcccaatactggatgtcctatggccaggctcctgtctggtctgcgtggtccttaatctcagttttctgtgctgagaacaccaggatgtccacccgcctgccaagggctctctgccagcagctgccaggagggctctgaagtcatacctgtggacatgtccaggtgccctctgctgcttgcttcagtgaagcctaaatgtggcttcgtgagcatccacagacgctaggcagccaagaacttccagaaacagacgtgggtgtgggagggcagggcagggacctggttctgcacacagacacacaggtggggtcctgtgcatgcagaattctccccttctgtgactcccagatttgggggaccctgaagacttggggtttggagtggcactaggggacactgacagaaggtagtggttttgcaagagacagctgtcccgccgagacgggtgggctgtcatgtggccagcaggatcccatccccttttctcccaggtcaccccagcactctgtatgggcctgtgagatgctgagtgacattgatttcttgagcactcaccgagcccaggcactggggctacagcagtgaacacagctgacaagatccctccctttaggggggcagatggaaagtcatcaagaaagctatgtgaagcgtgaggagcaccaggtggtggtgagggccacggaggcagatggagtgaggggaggaaacagaagtgcaggtgctgctccaaacagagtggctggggtggggaggccaggaggggagctggtgagcatatggcggatgcagggcaaggggctccggctggcccaaggggatggcacatgcaaggccctcaggcaggcacgggccagggatctgggggcagggaggggccgctgtggctggaacagagcaggcgaggggagcatggaggaggtgaagtcgggctgggggaggggaaggatttggcaggcagagcggggaccttggggttcactctgaaaggagggcatcccctgtaaggccaaggttgctggggatgcgtctgtccctcacagtctcaaaagtgttcccggtgtccccaagggtctgagtggtcacgagactctcaggaagacctcctgctgagtatgtctgagtgtgagatgtatgcatgtgcacagtgtgtacacgagtgagtgtgaatgtatgtgactgtgtatgtgtgggtatacatgttagtgtgtgtacacacctatgtgtatgtgtacatgagtgtaagcatacatgagagcatgtgtgagtgtgtgcatgtgagtatatgagtgcacatgcatgtgtacatgagagagggtgtgtacctgtatgtgagtgtaaatgtgtgtgcgtgcatgcttgcatgtgtgcatgtgtgtgcatgtgtgtgagtgtgtgcacatgtgaatgtatgtaggtgtgtgtgcgtatgtgtatgtgggtgtgtgtttgtgtgcatgtgtgtatgtgtgcgtgtgtgcacacgtgtgtgcatgtgtgtacgtgcgtgcgtgcatgtgtgtgtgtgcatgtttgtgtgtgtgcacgtgtgtgcatgtgtgtgcgtgcatgtgtgtgtgtgcgtgcgtgtgtgtgtgtgtgcagagaggcactggggagtctgggtaaaggggctgcaggacttctgcaatcacacccgtcaccctaatacctcagtgcagattttctaagatcaaagacattcccctaaatagaattactcaaatcagaaaacccagcctcgatataactctgtagcctccaggccctgtccaagttccaccagctgccccatgagtaacttttatagcagtttcttcccatccaagatcagatgcaggctcaggcattgccttacttgccacatcccttggcctcctgtcatctgagtgacgccccggccttccttggttgttggtgacactggcccctttgccaagggcaggcagggcatctggccccatcctcactctggctgctctgctgcatgtcccactgtatccaggctgtctggctggattcatttgcagtgtgttaatttcacccccaaagtggcttgaatggtggcctccaaaaagatgtgtccatgccctaacccagaagcctgtgactgtcacctgattgggaaaagggtctttgcagatgtaatcaagttaaggatcttgagatgaaactatcctgggtatctggatgggccctaagtccagcaccaagtgtctttgtaacacacagaggagagacagagaggaggcgacagccgtgtgaggacaggcagagacctgagtgaggccaccgcagccaaggaacgctggcagccaccagaggctgggagaggcaagaaaagagcctctctcgggcctccagagggagcgcagccccactcaacctcgggcttctggcctctagaactgagagaggctcccttgctggagcccagcacatgttgtcagcggtaggggagctgacctctcctacccgaggccacccaaatgctagtagcttctcccacacacccccggccaaggccagaaacattggatgcctcaagatgtcttgacatatcctaggctgtggcggccaccccaaaatgggaagttgttttaagcccctctgtggatggtgacttgtctcacagccctgggaaatccgcacaacctctgctttctctcaggtcggttctccggccactcttcctataatgccgttcacaaaggtgacaactcagtcctcgactgtcagcaaacagtcccgctcccacagtctgaggccacgtgtctttggatgaggggatgtcttctccatccagaggagtgaccaggggaggagaccatgatggtggagctgctgggtgacagaatggacaactggcctgggaaagaccccgcttcccattttggggtggccgccacagcctaggatatgtcaagacatcttgagccatccaatgtttctggcctcgaccacgggtgggtcagagaagccactagcatttggtggcccttgggtaaggagaggccagctcccctaccactgacatgtgctgggttttaggccaggctgggccccaacagggctcagaacaggaggtggggggtgggggcagctgccccaattcaggcacatcctgccacctgacagtcacagggcggggtggcatcttcctactggcaatgctgaggtgcggacactggggcctcacagcaggctcctccactgtatcaggaggaagcggattcagctgggagtgaggaggtttgcagaccctcaggggctgggtttcccacagctctgtgcccaggtaggtggcacacggagacaccatccttggccttgcaaagcctggattcatcttgcatgtcacccttggatccccaggaagatcctgcctgggggtggggtgtggggttcagtctgttgtggggcggacctcagctgcactgggacaaccatgtggcttcagggaggggctctttcttctctgccttcttttactcattttgtttttaattttaatttaaaaaaaacataaaaagctttaatgaactatgggaagtgtttcttttgtaccataaagaagagctggtagagtccctggggcgggggatggggtggcctccactttatgggaaagtcccaggtttattgtgagcatcaaagccagggaggctcctctgttccagggcccatctccatccagatgcccgtggcccatatagcattgtcatcgggtcatcatttaacttgtacactcactttgtcaccaccccaacctcaagatgagaccccactgtgcaggagtctgcgctgagtgatagcagtcagtggtcctgacagaagcagcttgagagacggctgggtcgtgtgatgctttcaaatcccatctccaagaatgttgcgtgtgcattgaacatctactacatgaacccttgcacagccttcctgagaagtctgataccaggatgctttcagtggcaaaaaccagaaactgccatgcccatcatcttaaaccctcaagaagtgtgttacctccctccccagaggcctcagggcagccccaagctggtgaatgcagcagcccgcgcggcctggaggagccgggtgcttttcgcttttccactccgccaccccagactggctccctcgtggtttcaggatggctgttttgatttcagggggtggaaaaagaggatcctggccttttggggtctttggatcagtgaggacacctcttccaggagctcccatcagacctttcctcacccctcattggccagaactgggtcacatgcccatcccgaaaccgatcaccatcaataggacccggagtaccacgactgactcacaggaaccgggactggcacctgcgctcccaggggctcatgggcctgagagctggacctggagctacatcaggggccgttaggacacaggaaggcaaccaagggtgcctgctgccatgaccttgttccatccttgagtagcaagcacatctgtgagtgtgtgttgggtccacaggctcaatagtaacatacaacgggagcaacccctgtggtaggcagcagcacttccgaatccccactcctcaccggccgttcatcaccagaaacgtggctgagtcttccagggcaggacgctctgcccacccaggccattctctagtggacagacctgccttcttttagtctagccctgggatcttaactggggaggattttgcccccctggggcatcagtagctgatgtctggggacatttttggttttcctgactgggagggaagattgctagtgacatctcgtgggtggagtccagggatgctgcagatgccccacaatgcactggccgcccccaccgtgagttacccagccccgaaggctgatggtgccatggctgagaaaactgctctatcccagggttttgccattacaaagtcatgctcacaaatgcgtgaacgctgttacttatcgacattacaggagattttcaaaaatcgtgttaacagaatgcaaatgttagcatcagaacgtaagatccagctttgcggcaacttcgctgtctcaggggctccctgaagaaatcctgcaccgtctcacttctcacatggcccgtgcaaagctgctgtctaggtggaaagctctccccaccccaaccccgaccccttccccattcccttctaaccgcccacacctttcagggcttggctgagaggcctcttccttcaggaaggcgtccctgacctctagacctcagtggtcctactgccacccgtgtgtgctccctggtcacgtgtctgctgttgaacagccacttgtgcgtgctccctggtcacgtgtctgctgttgaacagccgcgcccgcctccctgcggccttgctcctgcccttccttcaagggagcctgtgcgcatgctgggctgtctttgcaagctcccacgccacctacctgccaaccaggtggcttgagagggctgacgagagctcaccctgctgcacctctctctatgatcagacacacacctgctccgcattgagactcgaaagcgcaggctccagaattgtttttttataatgatttataaaaataacataaatcaaaaattactgctgggaagctgtccgtttccacacacatctgtacctgtggctttgtgcatacaaggctgactcacaggctgccactgaaatcctctggaataaaatcaggttggcatttcttctattcagcactgtacagaataaacccaggcaagacaggaatcaggaggcttttagctacaaaggaacacacttctaccagagatgcttttaataactctttatcattttcatcacgaatccagaggagggtggcagtgccaggttgctcgctgatggactcagtgacattatcagagacccaggatccttctaccctccacatgtcaagtttggtcctaaggctcatctcctcatggcgcacgagggttgcaccagctccagccatcacctcctcactagctatgtccagatgtagagaataaacatttccttctagagtctctttttaagactaaagaaaccgcttcccaaattccttctgtggacgtcccctctggacttatgaacttcagcctgtgtctcttcctaacgacacttggcaaaaggaattgattgctctggttggctaagaccaggggtggcaaacgatggcccggggccaattccatccgccatctgctcttgtaatagccacatccttgtgcttgcttgtagtctatggctgcattcacactacagtgtcagagattatatgcctaaagtatttactagttggtcctttacagagaaagtttgccagccctggtttggactcagatggatgaccagggcaggacagggccatccgtgagcacatagagaaaggggttggtgtcgggggtggaatcattcaggtgggaacacagaggtatctggttcaaatctggctttgcctctgacaagccatgtgtccctggggaccccctaatctctctgaggcttagttcctccgtctgtaaaaagtcaaacctttcaccgtttctgtgtggattaaacaaggtaatagacacaaagcacctggcacggaatagaccctaagcgttatgttccttttaagcctttcctaatggattctatgctgttagactcaccccaaaagagaggctgccacagggatttgcggtttgctaattggaatccaaacattgcttctgctgttacaaaagccaagttacccaaagtagaattggttttaggagcttttttgaaactagaaagagctgacaataaaaactccaaaggagacttgtgcaactggtgatcatgggtgggaaggggtggacgggatgtcttttcttgagggttttaggatccaagagtgttttgctcccagagatctttgttgttcgctgcatgtcaaggcagggggctgagcaggaaggattgctgaagacgtcctggtgacacgcattgaaggctggggtccccaactccaagccctgagaacctcttataatatcctggccaccccctattttggaagaaaatggctaccaaacaaaatgttttcattaagtcattaattttatttgtttttttttttaaaccgatcaaaaacatatgtattagccaatctggacttctgctgagaccagaaagcaagagacacagggtaaaaagaagaggctgtgggtctagacagacctgagtttgcatcctggttttccactttggctgtgtacacctggggcaggagacctcaggtctccagactcactttcctcatcggtaaaatggggatcagaacagcacctccttgctaaggttcttgaaaagatttgataagcccagttaggaggtaatatgatgatgcaggaagggcgtcagggcctggtgtatagtagatgctcaacaaatgtcagagactatgttttctagtatatatatggctccagcactgcaaggcagatactaatgccatttttcaaaagaggataccaagactcagagaggtaaagtaatttgttctacgtcacacagccaggaagggccagagcacaagtctgggtggctccaggacaccagtgagtagatatcaggctacttgaccaccggacagtgaccaggagacccactgagtggccatgattcctgcctgaagcagagccaggcgttgtttgagtcggggctgcctcaccttaggaggtggccttctattaatagcagtgttgacaacagcctctaggtgcacatgcctgagtccaccccaaagtggggaccaggaagatccccaaccccaggggaaccaggaagaggctgccccaagcagccacagggcaccctggaggaccccccggcggccagcagagggcagcagccacctgtaagggaggaggcccttgggttgacacaggcaggagaggggctgcccagcgccaggtgtccctgcctgtgtcctgacaaagttacaacagtggggaccctcacggttctgacgaggtgccaggacagtccttttggagcaggcactgctgctatgaccaggcctttcacagaaggtgtctaagtggcacggcaccggtagggagctgggcccacgccctgacaacctccccacccccagggctccttgcacttcccgcagatccagaggcaggaaccgtgcaggtgcacacagcccgggagctgggatcctccgaggccagcacagctcatacctgttttcgagacgcaggagctgagattcagagtgggaagttatctacccagtgtgattcacggaataatgtccagagcctgtgaacatgtcactttacatggcaaaagggactttgtaggtgtgattcaattaaggatcctggggtggggagatattcccaggttagctgggtgggcacagtgtgattccttataagacggaggtaggagggtcagagtcacaccaaggccatgtgacagagcagcggaggttgaagtgatgcagggagagactccaccggccaccactggatttggggagggcggaaggggccacaggccaaggaatgtggtggcttctagaaactaaaaaggccaggaaattggttccccccaaagcctcaggaagggatgcagtctgccactccttgattttagcacagtgaggcccacttcagacttccgagctccagactatgagatcaagtgttgttttaagccaccaagtttgggaaaatttgccacagcagcaagaggaaacgaacgcactcaggtgctcctgccacacacactcacagttgcacaagctggtgcagctccagacccacacacctccaccaccacacactccgccatgcacacacacctccacgcacacacacctccacccgcacacacacacaccttcaccaccacacactccacccacacacacctccacccacacacctccacccacacacacctccgcccacacacacctccgcccacacacacctccgcccacacacacctccacccacacacacctccgcccacacacctccgcccacacacacctccgccctcacacacctccacccacacacacctccacccacacacgcctccacccgcacacacctccaccaccacacacacctccacccacacacaccacccatgcacacacctccacccacacacacacacctccacccacacacacacacacctccacccacacacaccacccacacacaccacccatgcacacacctccacccacacacacacacctccacccgcacacacctccaccaccacacacatctccacccacacacaccacccatgtgcacacctccactggcacacaccacccatgcacacacctccactggcacgcactactccacctgcgtgcgcctcccacctgcgttcaccctccacctgtgttcgctcccacccactcatgcctctccacccgcaaaagtgtgagtgctgaggctgggactcaacctgagccgctggctctggattactgggtcctgccgggctggccaggcctggtcacaggccgggtcccagtcagcagctctttacctcaacaaggagaaggttgggaggtcgctgggattgtcattacttgtccacattagtcagggttcttacccttccctcatctctttccccatccccatgcctcccattcattcattcagtcattcattcagtcagtcagtcattccttttctcaacaaatacatatttactaagcacttactgtgtgccaggcaatacagtactgaacaaggcagtctgctgaaggaggcagacacaagccccgagagggggtgatgtgacatcatggagggcttcctggaggagagaaagttgtaatgacgagatgccaggcagccaaagcagagaggggttcatcgaacgaccacatatgaggcactcgccatgccagcgggctggcagctggataaagtgaggtcctccgggactcaggtccagtagagaagtcaggcacagcatagggggtgctgggaggtggacccccaggagaggggggaaggggaggagacagaggttacaggaggagcccagggagggcagcgtggagagagcataggctcagggggcacagccggtgtccctgcacctgactcgcagtgcgcgctcggggaacagctgctgggtggcgagtcaggggcagcaggcccgctcggcaaccacagctttggcttcattctcaggacctgcgtgtagcgagcgactccgcacgagcttgccctccgcaagggcctgcagagagagccgctcccccgcacgcttcttgccaccggctgagaatatgctgagcacccaccagagggcgtccgcactcactgtgcccccggcctgcgctctcacagttgacaagggacacgcgggcacgcgcgcagcctcatgctcacgcactcacacgcatccagtccctcacacactgaaacacatattcacacacatgcttgctcacacacagacccctgcacattcactcacacacacactcatacagatgcacgctccaacatgcaggctcgtgcacacacacactcagaaacactgtcacacacacccctttccacacagccagcatgccaggacaggcctgtcatccccctgagagttgcctgtgccctacccaaggtgccctgcaagagccctgccctgagcggtgaccccagagcctcagacttgcggggaggggtagggacctgccaggtggccataacatccccagaggcctgcgagtcctgccagggccagagggcagtgagggtccccaggccgggacacaccccgacagggatcagtccgtccagctgggaggacctcccctctgacccctcctccacgcaggcccagctggagaataagcacaggcacacacacttccaacccaccgcctgcatccattacaaccacccttccacccgcacagacttgctgggagccgggaagatgccagcctgcttttctgctctccctccttcaatccgcaccggggtctagggagcaggcgctgtcgtgatgatgcccgctttacggagaggaaactggactccagggtatgggggctgccaagagcagcacaggaaccgagccggtgggcatccgcaccagcctcctgaccctcccctcttgggttccctgagttggtgggagagcacccagcccctgggcagggaggccaggtgcccggctgcccaggcgtgggaggggcagagccctgcccacctggggtggacacggcactccaggagggtgacaaattcactggaccttggacaggcatgagggtgggggtgagtgattgtgtaggaatatttgtggggaggtgcttgtctctccgcactgtgaaatggatgctcagagaactccccacgaggctggtgggagggtgggtgggggaggggaacgcctgtgtgacgtagaaataatgactcgggcagtgcgacggctcatgtctgcgggcacctacgtgcaggctgtactcctcgtgtacacatctattaatttgtttagccctgatggccaccctatgaggcaggcactgttgccatccccctttacagaggggaaactgaggcacagggcagttaagtcagggtcctgcctgagctagtgagcagcagagccagggtgcagacctgaggagcttccctctagacccagagcttcctctgtcacagatggccatgagcctggcggcgtaaaacaacacccacatgtcaccctacagctgaggttggatgccagctgtgcccttctcttttctggctgctccgaggcctcatccccatcttcgcctctcagagcgcatttcccttgcatctccagtcccttctccctccatgggtgctgctgtgtccccgtctgcgtgctccttccctgtgtctgtctgtaggcgtctctatgcatctccatacgtgtttctgtctccaccccacccctgccctgcgctgtccctttgagtggagcaggatggccaggccctcccatgtggacagatcttgctgttcctcatggaaattcaatgtccctgggccttggatctccttccaatgtggaccaagcctgggtcttgctgtgtctccgggtataccggctgcagccgcctaacctgagaccctgctgagggactcagccctgatctccggggcaccctctgcccagctgtcctatccccccctttgttcctgcctggtcacccccacctcagtgacaccccccacccgccactcagtagaagcctcagaccttccctgcagatgaaggggagtgggggcaaagggaggcctggaatcagggggttgtaaaatcgtgtcctggaatttgctggaagcagaaaagtcccccataaaagtctttggatccctcatattcggtttcacgagccagtcatccgggaaatggctaagagcagaccagcatcaaagcagcggcctctgctcccccagtcccagcccggtgggcggtcaggcatgggagaggccagggcctggtcaccgagcctgtcctttgcttgtggctgcgagatgctgagtggccatctgcagcccaggatgactgtcttgggtgggtggccctcccggccaggcccttgagtagtctagaagacaggacagagacccgggacctccgcctctgtgggcacacagacctcagtggcacgcctcaggcttggccagaaccctgacctgggttgcacccctcatttccctccacagcaagttcgtcccacactgggtttcctcaccagaataaaagtccccactgctcagatcacccgggcagctcctgatgggtgaggacaggatggggcaggtgggaagtaagtaggtgctagagcaggctgagaatcttggctaaacaaattcattcattcatttaagaaagtatctcttgaatgccggctaggagcaatgttcagtaagcctgggcaggtggggctaacaacacctgcctcgtgaggtcgctgcatcaattaattaattgctcatggtaatcaaaatgggcttaaggtcaggctcagttcaaacctcagctccaccacttactagatggggtgttgaggtgctcaatttgacgcatgaacctggtgaggtcgcagtcccctgttattcaaccaaacactcatctaggtgttgctacaatggcgtttggtagatgtgattaaagcccgtcatcagctgactttaagtaaaggttggcctggatgacccggcgagcctgatccagtcggtggaaaggccttagagctggcggaggctccctgcaatggaagaaattccgcctgtgacagcggcctgagcagtgccccagagacccagcctatcctccacgattcccaacttgcctggccaggccccaccatcgcctaagccaactccctgcaataaatccctgaatatctgcctcctactggttctgtttctctggttgaaccctgactgatacaggggcactgggcaagttactcagccatagtttccccagctgtaaaatgggagtaacaatctctcatcaaattgtagtaaagagagtgggatctacataaagaccatctgatcactttctagaacatactaagctacttcctgcctctgaacctttctggttgctgttccttttacccgaaatgcctctggctttctgtgtgatgggcttccatctttcagaacttacttaaaggtcacctcctccaggaagctctccctgaccaccctggccaaagtagctctctttgcattactcttggtcggatcactctgtttaattcttctgctgcccttagcatagttgaattatttcattgattattataccgatggattcagatgcatttatataacttggtcaacttgtttattgctcatctcttcctctaacctgatgtttctcaatctttcttttttttaattaatgtctcccctccccccgggaagctttttattttactttatttatttatttatttttttgagatggagttttgcttttgtcacccaggctagagtgcaatggcatggtctcagctcactgcaacctccacctcccagattcaagggattttcctgcctcagcctcctgagtagctgggattacaggcacccaccaccacacccagctaattcttgtatttttaattgagaccgggtttcaccatgttggccagggtggtctcgaactcctgacctcaggtgatccacctgcctcagcctcccaaagtgttgggattacgagcgtgagccaccgcacccggccagggaagctttttagacatttttttcttattcatttccccataaagtgctaatgccacacacacaccgcctacctgtttacccaccatacgtatatctatgcttcctacataaaaatactaagattccttttgcccctcaagagcccactgtcactccccatcagcccctgcatgttccagcccctcaacactcataacatggtccaggacagtcatgtcagagccccaggagcgggttagaatgatagactgccctgctgcgtggcattagcctcctttttaacagggtcccatgacccatgcccatgtcacactttgggaggaaatgctccagactttacagttttccttgctcatcttgggaccccagagcgtcactcagagcctggcacacagacactctagatatgtgtgttccaaattctcgtccccttcctctctgttacctctttcaccccctgcttctccaacagaaatagggctgccttaaggcccaaagccacagatatgaaagaccagagactcggaggtctgaatcacccaagtctacaccacctgcctccaggctgtgagcagaaacctctgcacaggagggagggcaggcacccagtcctttccacgtgcaagatacaggcacgtgttttcacctcagcaccattttacaaaagagacaaagcttggtctctttttcctcccttaacttggaacctaccagctactctaccaagtctctacaacaagacaggaaacgtccattcctgacacatggaggtaatgggcataaggctgccagataaaatacaggatgcccagttaaacttaaatttcagaaaaatgacaaataatgagttagtataagtatgtctcatatattgcatgagatatactaaaaaaattattcattgtttatctgaaaatcaaaattagttagaagtcttgtatttttacctgcatgggatatagttatgctacaagagtatttgttgtttatctaaaaatcatatttaattgggggtgccatatttttatttgctaaacctggtaacccaaaatgggcaggagtggctacataattattaagaattattaaagatttccagatggtgccaggagagttttaaaccaagcctggagaacttgtgagcatggccctgtgcaactgccagagttgtacaccctggaagccagccaccctgagccctgcccgtcctccctctggtcacatggagggagtgtcctaggcactcccactctctgtcaagcaggacaggggatatggcacctagataggtgacagaattcaggtgatatctcaagaacccaaggaagaaaggtgagctcaagagtttcccaccggctcccgtcccattaatgtcggatagatggcaatttcgagtcttgtgcttgctattataagctgcttcaaatccttcaggaaagcagctttagataatgataattcctaaaggggccatgggcatgggattagggagggagtatgggggcctcagctgtttctgtaaggatttaatccttttaaaaacaagtctgagacaaagagggcagcctgctaaacgagcaagctggatgatgggaacacagggattcacattagtaactaaaggtttatttaaaaaagaaaaaaaagaggcacgggccacacactcgatctaacaaggtcctcccactcggcagggcatggccaagccgaccagcccaggttatacctctaaaactggaaactttgttttcatatctcgcccggatgacacccaactgtaaaagcaaggatgcaagtttgctgatcagttctaaatggttttttttttttttttttgagatggagtctcgctctgtcatccaggctggagtgcggtggcatgatcttggctcactacaagctccagctcccgggttcacgccattctcctgcctcagcctcccgagtagctgggactacaggtgctcgccaccatgcccagctaattttttgtatttttagtagagatggagtttcaccgtgttagccaggatggtctcgatctcctgacttcatgatccgcccgcctcaacctcccaaagtgctgggattacaggagtgagccaccacgcccggccaatcagttctaaatgttaacattggtttgccaacattagaagctaactgttgcataaggatctagtatccagaatatatatatatcacagttcaacagcaaaaagacaaacaggacaattagaaaatggacaaaggacttcaatgggcatttctccaaagaagataaacaaatggccaacaaacacatgaaaagatgccagatactgttagtcattagggaaataccaatcggaatcacaacgggatgtctcttcacacccaccaaagatggccataatcaaaggaatggaaaataccaactgctggtgaagccgtggagagatttgaaccctcggatactgttggtgggaattaaaatggtgcaaccactgtggcagacagcctggcagttcctcaaaaagttaaatgaacctatgacccagcaattccactctaagatatatactcaaaagaactgcaaattgattctcagacaagtccatgtatgctcctgctcagagcagcatcggttactgtacctaaaatgtggaaacagcacaatgtccatcagctgatgaatgggtacacaaaatgtggtccaagcacaccagaataggccacagaatattattcagccacagaaaggaagaaaatgctaatacaactacaacacgcatgaaccttgaaaacattatgctggctgggcgcggcagctcacgcctgcaatcctagcactttgggaggccaaggcaggcagatcacctgaggtcaggagttcaagaccagcctggtcaacatggtgaaacccagtctctacaaaaatacaaaaattagctgggcatgatggcaggtgcctgtaatcccagctactcgggaggctgagatgggagaattgcttgaacctgggaggcggaggttgtagtgagccaagattgtgccattgcattccagcctgggtgacagagtgagactccatctcaaaaaaaaaaaaaagagaaaaagaaaacattatgctaagttgaacaagccagtcacaaaaggccacatatattgtgattccatttatacgacatatccaaaataggtaaacccacagagacaaacacaactgatggttgccagaggcttcagccaggatttagatgtgagccccagacaggccagccaagcaagattcttcccacaccaccacctcacctgtgactgctggtgtgatgtggagcaggtcacttggcctctctgagcctcagttttctcatcaataaaacaagcatttaactaccaaacccctttcagtgctgtttttctttcttcctggatctcatgtcttgaagataggcttatcaatctatattttacaatccatttccccctttgggtaatcaaaaactttcagcatgtcagacagttccaaatgagataaccagaataaacacatagagttgagaatcttcacttcctcgcctacagccaacccaaaccccattcttcttttcctacactctaagggctggaagagcaaacttcactttctcagactcctctgcagccacacgtcacatacatttccggtgagatgtaaggggtgtctgctggagacctgggaaagcttttgatctcatgctaaaagggacagatgtcattgacatcacatcttcttcctttcttcatgcccactgacatgatgcctggtgctccagtagccatttggtggccttgagaaaaggcccaagagaatcacaggggcatcagcaaactgctaaaccaatgacagcacgtgcctccctccagccttcttgttatgtgagcagtaaagctcctctaaatggaggcttccactccttgaagcagcatactagcccacctgttatatcttgttccttaacacttctacagatgcagtggccactgtgtcggctggaatcattctgattacaagatgtgttagtccatctgcattgctataaaggaatacccgagaatgggtcatttataaagaagaagtttacaggctgtacaggaagcatggtgccggcatctgcttctggtgaggcctcaggaagcttccaatcatggtggaaggagagcgggaaccagtctgtcacatggcaagacagaaagcaagagagagaaacagaggtgtcaggctcttgtaaacaaccagctctcggagaaactcccagagtgagcactcactcatcaccatgagagggcactgagccattcgtgaggaatctgcccctacgaccgaaactcctgccaccagacccacctccaacactggggttcccctttcacatgagatttgtgggggacacatcctacaccatatcacaagggctagaaacctgactcacagcagcttcagcaggagaagaacttcactggctcctgtggttgggaagttggggaggagcatttggctccagacatggctgaaaataaaggctcgcatcagagtttgttaaccttagttagaactcctgacattcaggatgggaccagcctctgatgatgtggagtgcatcttcaggctctgtccatctctctatttccactctgtgtcagcctcaccatcttccccacagatgtgctccttgtagagtccaggaaggatccaggcttacaccactcccatcctagcagtcccagggcaggattctgatcgatgggtacccctaagatctcgtcgcctctccatctgattgtatgaagagaaagaagaatcagggccagcgtggggccaccgcccatgcctgacctgagcaggcagatgtgctggggcggggcaagtgtgggaagctcaccagggccaaagaaagtggtggaaaagcagtttctcagagaaaaactaggtgctgtcacaagaaaagcagcaaaacagaccctgggcatgtaaggaacaatagatttctggtttcatcaactccaaaatagacataagagaacttcacaaagcaagctgacttgctaaaattgagatacagccaggcactgtggctcaagcctgtaatcccagcactttgtgggggcagaggcaggtggattacctgaggttaggagttcgagaccagcctggtcaatatggtgaaaccctgtctctactaaaaatacaaaaattagtcgggcgtggtggcgggcacctgtaatcccagctactcgggaggttgaggcaggagaatcacttgaacctgggaggcagaggttgcagtgagccgagatcacaccattgcactccaacctgggcaacaagagtgaaactccatctcaaaaaaaaaaaagaaagaaagagagagataattcacatatcacaccattcaccattttaaaaggtataattcagcacttcttaccatgttcacaaggtcgtgtgggggttgctgctgtaggagtagatgagctcacatgaccttgtacgttgcaagaacccagctcacacttatccaacacacggcatcccagctctggccagatcacactctcgtgtctgttttacagatgaggaaactgaggctcagactagaaaaaaaactcactgaagatcacctacctacttcacggagtgttcacggaagattcaaaaacactccagctctctctgcttgagggcgcctcccggccttcttagcgtcaggggtgaccatgagatttgccgaggccacattctcttttcccactggcctgcctactggccacatttaagatgatggctgctctatctgtctgggtctctgagtgatcatggtagcactgtctctctgccaacctgcaagaggcatgtgatgtgtgtgagatacacctcagtcatgtgatgtgtgtgagaggtacacctcagtcatgtgatttgtgtgagatacacctcagtttttaaaccatagagatgttaggctcgattgtcacctcggcataatctaacccatcctggctgatacagtcacatgactaagagcccagagctaagatttatacccgagtctggggcccaggcctcaggccctaaccacccggcttcgatggagagtgtggggctttcggggccatcgctggggctcctgaggcctggcattggtgagcagctctgagtgtctgctcatggccatgaaggtaggcgtggcaggtggaatgccagggtgacccttgtcagagcccaccccttgcctcataatcccccctatctccagtgtggaagggcctgtggatgccatgggctagcgctccaggagcaagctctgctgtggcaccatgactgtgtgagttgaagggaccctgacctaacaaccaggtgagcccgggaatgggacgaggccccttctggaaaaggagattcaaagcctaaaagagatttgatgtgagggagattctcggttgctggcttcaaaaatggaaggggccacggagccaggaatgaggtggccaccaggagctgagagtgaccttgacggccagtaagacccaagctctaccccccagggatggcattctgcccgatcgcatgagcttggaagaccacccagagccccagaggagcacgcaggctgccaacaccttgacttcagcctggcgagacctggggcagggaacctagtcgcactgtgtgaaacccctgacctccagagctgatgggtagcaaaaggaggttttaagtcacaaagtttatggcgatttgttacacagcactgaaaatgaatacaaaagtgtgtctgttgagcgtggggagaacctcttggaagacccagctcctcctttgtccttgggtcccattttccagaaaccccctcgctcagcacacctggagatcctcccccagccccctgcctctattcctggcggctgctctaattcctctattattcccttaaatacctgctccactaatgcgccttgtgacagagaggtctacttgcaaggggtgaaaaaaaaatgaacttaagctctcaaatgcaggctcctagtcagagctgaaaacactgggccgagtgggcacaaagaatgccagctcttgccaacgttgttgaatgaggttttttagtctcgaacaaagctctccctttgaggattaactgccaacagggagctctttgttttgagtagaatttaagattattgctgggatagaaacggggagaaaggtgacaccatcaagatcgcaccgtgcaaatccaggattatagaaaacatcattttttaaaaacttgttggcaaatatggacacagattgtgctgacactccaaaacgtccacttgatttgtgaccaagtcctcggtctcatgtttccaaggcaggtgatgccttcaaagatatacatggatagccatgcacagtggctcacacctgtaatcccagcaatttgggaggccaagacagttggatcacctgaggtcaggagctcaagaccagcctgaccaatatggtgaaaccccatctctactaaaatacacacacacacacacacacacacacacgcacaaattagccgggtgtggtggtgtgcccctgtaatcctagctactcatgaggctgagacgggagaatcgcttgaacccacgaggcggaggttgcagtgaaccgagattgcgccactgccctccagcctgggtgacagagcgaggcaccatataaaaaaaaaaatatatatatatatatatatgcatccagtatgtagatcctggcacacagaaaggcctattctcacttgttagctttttgtgttgttagaaaaaaggaaaacaaatcctcaagatacagcccgtgtgttattcccgaggtagaaaaccctggcagtaggcggaagtgtgggtgactacaaggcagggctgaacgcgtccttccagaagtctaagtcctggcctggtgtccatgatcgctgacaacatgccccccgcaccttccgtccccgagcagagcttgctggggggaagaccctgccttgttgctcccattccaacaggtctgctactctgtctctctctctgagtaaactccaggtcccattcttgggccacggtcctcaccacctggctttcctgctgtgtctccatctcgcctacccgctccctccaccccagccgtgcctggaacacactgggcatgttcttgccccagtaccttggcacagtcattcctttcacccgggattctgctcctccaaatatccacctggctgactccatttcttccaactcatgctcaagaatcaagaatgtcgtctcctcagagggctccctgccgccctcatctcttctctgtgtacagctacatctcacaggcttaattctcgattctcttctcctcttgggagtggaggctccacactttgattcacattcatcctggtctcctcggagcattcaggccagtggagagattatgacaacacggggtgcacctggccacggtccctgccctcctgggactcccacttggggacaagtcctggacactaggctgggagagagggtgggaggatcagcaggggggacgtggggctggcctgatccccctcctccagcctgcacttgccaagaggccccaggccgggttccaagcagccccgtggctgagctccttcctggtaatgattttagggccactcaacttgtcagctctgcctttcgaagctcctaggcatgggctctgagccgcggtcactcctcggtgatctcagctcagggaagggagtcacgacacacttaattcaaaacagctgaaaaccaacagtgggaagaggactctggtgacaatggctggtgctaaggacttgactcggtctgcagccaggccaagcgcttgacacctgctctctcttcttctctaaagggattttttatcttaatgagttttcactgtatgtgaagcttttctcctttgacttgcaacataagcctaaccactaatggaaagagaagacactctttaattttttttatgaaactgagcatcattgactgaggtagaatgtatgtatagtcaaggtgcagttctgtgagttttgacaaacctccacagtcacaaaatcatcttccacaatcaagatgcaaagagttccaccgcatcaaattccctcaatttcatgctgtcttatttaatcctcacaggaaccctaaggagctactgaactgttaaggacagagagggcaggattttgtcctcatggacaccccgacttcccactgcccggcacagtgtctggcgtatagtagttactcactacatgtttgtcaaatgactgaatgaatgatactgatattattgttatgagcagtttacagatgaggaaactgaggttagagagcataaatactgtaactaataagatatgtgtcaaggatgcaatggcaagtctgttgtttgtatctgcagccccctgccacaatcaggggctctcagatccagaattccttacgtaggatgccaaaggcctgggtcgagatctctgtgcagcctcgtgggaagccagcctaaaacctggaaaccttaacctccgtctcctgttgcttctcaggttcagggacatttatgtagaggatgcttggggagtgggggtgggaaatggggcagattgaccttcctgaccacggggtgggagaaggagtcctaaactggaactccaccctcaggtccagtcccgactatggagtgacttgctgtgtgacctcagacaagtaccatggcctttctgggttctagtttctccaactacaaaatgaaagaggggctcccacctaaaggggtgaaagcatcctaatggctctgctcttacggttctgtatcggtcaggactttcttggttgcaagtgatggaaaatcccacccatgctggcttagggaaggacaagggaggatttttctggctaaccaaggagtttttggggagtgttctgattcaggtatggctcgatccaggtgctctgacaaagagtcagtctctgtctctgcctctatctgtctatcggtcagtctgtccctctccctctctctctgttgtttttcctccactctgggctctgctttcctgtgtattggctccattctcacgcaagctatccctatgggatggcggatcgtttccagcaagccaggctttcatcgtgtcttccctgagcccccggcaacaacagcaactcccttcgccccagagttcaggcaaaaggtccacattggctctgattggacaaacatgggtcacatgctcatcctggaccaatcactgtggccaaagaagcagcgtcccctggttagctaagccggtgtcacagaaccacatctggctatgagggtgtgggtgataagagccacatcatgaaactggaggaagagcagttttccagaaaaaaaaacctggaatcatttccagaataagggaatagatgctgggcagggaaacattttaaaaaatccattacagagtctgaattacacctggtccaactgagaccaaggagatttacctccattcattgtttctctggtgggtccagagaatccctcttgggtcttaggggtcccccagctccaaaaccagccaggcattgcctgcactgtcactgcacacccgggatcagttcacttcctctctcttcctccatgttctgatctgaaagacgatcttcccgtatttcccccacagctcagggaggaagtccatgtttacttcctcaaaggtggctgagggatgaggctcttcttgctggcccctgaggtcacaccagccctcagaagaaactgagaaactcctagtaattttcgctaaagaagatggttcaagggttgtgtgtgtttcctctgcctgctgtaataaattactacaaactaagtggcttaaagcaacacacgtctattctttgacaatccaaaccccaaaatgggtctcactgggtgactagcatggtgccagcgtggctgtgtgccttctggaggctctgaggggaatccgtttccctgtcttttccagcttctagaggcccctgcactcctcagcccacggccccttcctccaccttcaaagttagtagcacagcatcttgcagtctttctcacacctctgttccctgcttataaggactcttgtgattacactgggccctgccaggtcatctgggataacctcgtcacgtcaagagcgatctaactcgatcccatcggcaaagccccttctgctgtgtaagaggacacatgcgcaggtcctgcgacgtggacgtctctggagccgttattctgttgaccacaaaagtcattccactcattcccctgctgcctggtcctccacccagactggaccagtgaaaatttactttgtcttgtagaacggccttacggtggattaggatggagtagaaattctccacattcacacaagcacacacaaacacaaacacaaacacggaggcttctcacctcctctagattgccagcagtgcatggcacacacacaaattcattctttcattcagcaactatttatgaagcacctactatgtgcttgacactgcactggggctgccatggagatgaagacagggtcacactcagggagcttacagcccagtgcaggacagaaacatcaaaccaaataaatacgtccagatctgtgaaagaaatgagaagaaacaaacaaaaaacttcacaaatgagtactaatttattcatcaatctactcagccaatacttattaaaggcctactatgtcccagccatgtggcggtactagtgaatggggcagagccagcccgcgtcctcgtcctcatggagtgtacacgctaatgtgcaaaacaacaattaaacatgtgacagcagtggagatcggctaggaagagggagcacccagaatgggggtgttgacaaagggaagcagtgagttgcgtatctgttatccctagctgagtaacaagccaccccccagccaccatggcatttctcacgagtgtataggtcaactggaaggttctgctgatcaaggctggttggcactgatcaaggctgggcttgaacttgtgtctgcagtcagctggaggatcagttggggttggcaagtctaaaacggcatggcttatatgcatagtggtggctggctgtcagcccattggctgggccctgtgcctctcatcttccagcaggctagctgggttttgcttacccagcagaggtggagcccaagagataacagcagaaatgtgtacggcatctcctggcccagggttgcaactgggacagcctctcttccaccacatgacattgtccaaagcaagtcacaaggccagcccaggtcccaggagggcaggatggaccccacctgtcgatgagtgcaacagcatagtcacactaccaacagtaaggtcagagggagtggtggggcacgtggctgtttaaaaactctaccactaggaagatgacagcagaaagctgcccaggtatttttttttttctctctctctctgcacctgcaccactcacattccacatctgaccattgggaaattcttcctctgacacctccctgcctctgcctccttcttcatcctgctctgatttcagcctaggacacctttgctgggtaaatctgccaccgtggagctgagaaaagacccacgaggcccccggcaggccatccccagcactgaaggttcctggcgcctgatgccagcacgctggacctcaagggggccacaggacttctcagctcagctcttgatttttcaaccaccaagtcataaaagcttccacggaaatggccaggaaagcccctgtagcccttttgtagtgctggtttctgggttggcctgaccagcaaggatctttccagatctgcagtaaaatctgaccttcgattcaacccggcttaatgagtacgtacggctcacaaaggcccggcacagtccccagagctgctttggggtgaggcctccagccacggggccagcccttccctgtgatctcagtgccccctcccagtccccacagagccagcagtggcagctgcggggctgcagtttgggaaacgaactgaggcaagaggaggaaacactgagagctggagcaaacccagctgctgggaagtccccgcagggccagccagacctccagaaggcctggagggtcccagcctctttgcttgcacaatgtaatgaggccgttaccagggtggacctagcatcagactgcctgagttcaaagtcctgccctgccgctcaccagcttgtgatctgaacacgaggctcaccctctctgaatgcatattagccatcctcaaggtggggttaagagcatccaccgcccaggctcactgtatggacgaaagaagagccacgaggaaagctcaataaatattagctctaattgttattgcaggcttggagcacacctcactaatttggaaggcccagcgcagaggaaccacgcccagcccagcaatgagaaagcttgtgttctagttccagttctggtactgagacactctgtagacacaccctggaaaaaaggactcatccccccgtatcaagaaggagagaggcctggggggtggcgcttagtctcatgcaaacagcacccccaatcgcccaccaagggccaggccctgggctggacccatcgtctgcatcatcaccgcaaccctcccccatttcacaggagattaggagatggggcccagccaggagtcacccccggccttgaccccagccccaagctctccatgttcgtagttgtgtcgccaggctctgagcacttaggctacaaacggagcacagactctgagggctggggtcgctgctgctcctgcaaacagcccatgctcccagtctagaaaaatcctccagaagatgacagttccagttgatgggactgacaagccccccacaggaaggcagtctccagctgaccactgttccgtgaggctgtctgagcaggcttcgctatgcacgcataatagcgacagcgcaaacagcagcagcagcagcagcctcagctggctcggcggggcttggctcagcgtgtgcggggtgctgagctaagtcttcccaaacggcgtgtgcggggtgctgcgctgtcttccagatccgcttgtgcagggcgctgtgctgtcttctggttcggcgtgtgcggggcgctgtgctaagtcttccggctgggcgtgtgcggggcgctgtgctaagtcttccggctgggcgtgtgcggggcgctgtgctaagtcttccggctgggcgtgtgcggggcgctgtgctgtcttccggttcggcgtgtgcggggcgctgtgctaagtcttccggctgggcgtgtgcggggtgctgtgctaagtcttccggctgggcgtgtgcggggcgctgtgctgtcttccggttcggcgtgtgcggggcgttatgctaagtcttccggctgggcgtgtgcggggcgctgtgctgtcttccggttcggcgtgtgcggggcgctgtgctaagtcttccggctgcattcgcactctttccctccgactcaaccatggcagtgaggcactgttttgttttgctttgcttctcaattttcctgtggtaaaatacacctaatattcaccatcttaaccgtttttaagtgtacagttcagtggcattaagtaccttcataatattatacaaccatcaccatctccagaaccctttcattttcccaaactgaaactctgtccctgttaaacactaactccccacttccctgctcccccacacctagtgaccacccttctgctttctgtctctatgaaatggactgctctagagagctcctatatgtggaatcatacagtatttgtactttgtgactggcttatgtcacttagagtaatgtcctcaaggttcatccatgcgggagcctgtgtcagaattcccttcctttttaaggctgtataatattccattgtgtggatgcaccacgttttgcatatccattcatctattgatgggcacctgggttgctcccacatttctgctgttgtgaatagcgctgctatgaacataggtgtctcttctagaccctgctttcaattcctttgggtttgtatcaagaattgctggaattgctggatcaagtgatgactctattttcagttctttgaggagctgctataccgttttgcacagcagctgtgccatgcccaccatcagtgcaaaagggttccagtttctccacatccagcaaggtattgtttttatgccccatcttactgaaggggaaactgaggccaagagaggctaggtcacttgctccaggtcctccagttaggaagcaacacagtcaggactgaaacccagacccaaccaagctctgagccctcacactgctcccgtgcccttgcaaggacgcaattcactcggcccctcattcggagctggagctgcaggtttagagtcacagttgtgctgtaaggcaggggtggtgcagtgtcaggagcacacatcagaagctgcctgggcacccatccagctccccccgacaggagccactctgatcctcaatttcctcaaatataccacaggaatgggagacatttgggattttcatgatgataataaatgtaaaattttaaaaatcacacttggtacatagtaaatgcccaatcaattattatttagtctggtccatgctccttacagagagatagtgtgtggaaattcctggaagcaaaacagcatgacatcttcagggatgttcaagcagcagggagcaggggatgcggggaggggcaggcccaggctgcaggggcagacggatggccagacctccagcaacctcaggccatgcgatgaatgttatctcagggccaccagagggtttgtgcaggggcatgatgggggcacatttccattttagaaagcccatctggaaaatccagaaagaaagaggccagagaggagactgtggagtaatcaggagagagacgattgggaccagaaccaggctggctgcgctggcttggaggtggatggctacagcttgggcatatctgagatgcaagggtccaggagccattgcttcactgtgaggggtgagggaaaggaggcaaggataactctgtggtcctcgaggatgcctgaggaatcattcactgagccaggggactaggccaaggaaaactgtcatgcccatttctgggtccactttggcccactggtgccataagccttggtgccaaggcatggccaccatgttccaggtgtggtatgagccatgaggactccagcagcaccatgtcctcccttgttccccacaccatacctccatgaatgcagcccacgtgaggggttaagagggagctgggcccatttcctcagccagcttgtctcctctcagtggcctgtaaatggtcctcgaaagaggaagacggccggccaaggtttctgcagtgaaggtctctttccttcctaaagagacaacccggggcttgaacgccggctgcactagcactgctaaatgatcttgggcaagttcctgatctcctctgctgtttcctcgtctttaaaataaagacaatcaaaggaatttagacatgaaaagtcctttgtatccaggatgcagtagaggctctatccactgtagctgcattgttgctctgatggccgttggtactggtggtggtggtggtgatggttagtgtgatgactgtcgatgaaaaaagtcaaagtctgaaaaatatttaaggagatttattctgagccaagtatgagtgaccaaggcctgtgacacagccccaggaggtcctgagaacatgtgcccaaggtggttgggttacagcttgattttgtacatttgagggggacagaaggtacaggcagacatctatcaatacatgtaaggcgtacattggattggtctggaaaggtgggacaactcgaagtggtagggaggcttccaggacataggtgcattcaaagattttctgattggcaattggttgaaagatttcagttactatctagagacctggaatcaacagaaaggagtgtctgggttaagataaggggttgtggggaccaaggctcttactctgcagatgaagctccaggtagcaggcttcagagagagtagttggtaaatgtcccctatcagatctaaaaaggtgccagacctctagtcaattctctctggaatcagtgaaaagacctagaaagggaagaagattctctgcagaatgtagactgtctccatctccatctccatctccatctccatctcttatgtcttctccacaagagacagcttttcagggccacttcaaaatatgtcaaagaaatctattttgggggaaaatactttgatttctttcagggcctgctatctgtcatgtgatgctatgctagagtcaggttggaatttggtatcttatcgctacaaagagcctgttttgtcagtctcaaggtctctctggtttaatgtcaatgctggtcagctgtgcctgcactccaaagggtttcatgaggcatgtctgacccccctgcccatcatggcctaaactaattttttgggttgactttggaaagtcctcggccaagaggaggatccattcagtcagtgggaggcatagaatcttattttagttacacatgatggtggtgtttttggtggtggtggccctggcagtaccggcggtgttggtggtggtggtggtacttgtgatgttactgtttgtggtattgttgtttgtattgctgctggtggccctggcagtactggtgttggtgttggtggtggccctggcagtactggtggtgttgatgctggtggcccttgcagtaccagcagtgttggtgtcggtagtggtatttgtgatgttagcgtctgtggtattgttgtttgtattgctaggggtggccctggcagtattggtggtgttgatgggggtggccctggcagtattggtggtgttgatggtggtggtggtatttgtgatgttagtgtttgtggtagtgttgtttgtattgtgggtggtggtcctggtgatgtttatgtggttgctgttgatggtggtagtggtggcactggtggtggtggtgatggtggtgacgtgtggctccacaggacccactgaaaggcaaggatcagcctggctgcaaactgagttagcatctgactcagttgcttgctcctggcctggagcttctggggtttctgatcccttcactgcaatccatgaatctctcccagcaggtatgacagcctgacccaggggctctgggaaagaggggttttcatcctacatgagaaagaaccacaccaccctccaagggaaaaagcagtcactggcaggcctcaaggtgcgattcgcagtctcctgggtttctggggccatttgtcctggtcctgctcggctctctgcccatccctgctgtgtaaacagcactctctctcagaaggtcttagctttgcttccctaaacaccctggacctgtgatcaggactgccaccttctgccctgaaggtaaaagtgatccagccagggggaggaggggcctgaggagccaggtgcaggaggtcaggggtcaggggttaggacagtggtaccggccaggaggtgcctccgggccagctgggctccatcacacaggcactgccccctcccccagccctgccccagagttgagggaagggaagacaggggaactagaaagaaagcacgaggaccagccagctgggagaggccaggtctgtggagcacctgctctgtgcgcagcagctgctgcctcaggtggagtctgtggttcccatggttcctagagtgaggactcatcctgccagatggagggctctgggttctgctgagcaccttcaggagttcaggtgagaggctgtgggacttgagctggggagagctgcattcctttatggaacatcataaggtgaagaatctggagctgggggagcagtgggggcaggaggggtgggagccaagatggaggagactggagggaagggcaggcgctgaccaagccaagccacaggctctgacagctgcgtcatctagtcccaaaggcacagaccccagaacccctgcatagctcctgtgggccacccaggaaacccaaatgggctcttacaaaacattgtcttagtctgttcaggatgctataaccgaacaccacagactggatggcttacaaacaacagaactttattgctcatcattccggaggttgggaagtccaggattaaggcaccagcagattgggtgtctgctgagtgtgtccctcctggttcttgggtggcgccgtcctcccacagacgcaggaacaagggagctctctttgctctggctttatataacggcactcatcccatctatgagagccccaccctccatgacctaatcacctcccaaaggcttctcttcctgattccatcacagtaggggtgaggacttcaacctaggaattttggagggacccaaatatatgcacatttaaattctcatagagaactcatacacacttcttaacagtcccagagaagccccaccctgagtcaggcacacgcatcagacccagaatgaaatgcaatgctgtatttccctaactccatccatagcttccttgaatcactcttcatccagacagcagcttcccatccaccggggctgttcccatcagaggttgcagcaaggtttccagagggccttgccggctgcagcagtggagactggggacacacctgtctgccagtcacctgcgctgcaggccactatccactgagatggaccacatcctgcccatccttgagagattcacaaagacatcatccagtccatcccctcccgcattcccaggctccaggtgtctccaagtctgcctttacttcggggacttctgagcatccctggacacaggggtggggtaggggaagaggctgctccactccccactcagggctggagaaactcacaaagcagaggcaagctctctgctcagatgcagacacgacgcgaaccagccatgtctcctctgtcgccggaacgcagctcatggctctgcccttgagctcctaccgctccaggcctctctgatttgttcgtgcattggggaccttccatgaaactgacccaggaagggcagaacatgaaaccccttctcaaaagctgcccaccatccaacctctggcttctcttcctctctctcccagcccaggacgttttacctcctctagagaggagaagaggaccctggctcgttcaccacttattccttatacattgacttctttagggatgaaagctttgaaaaattatgttttggaggattttttgcaagtgatttgatttacaatgccgacattttagaaggtcaataagcaaaagtggttttctcataactggatgaatactgctttacaaaaaaacgaaaagaaagtcaaagccactgctttgcatgcaaaccccagacgtagctgtgtttacccagaacaaaataaaaggacttttgattaaactggtagaaactcaccataggttttgaattcatacttgaaaatcatacccagtggggctgacattttgttaaatccatgctcacagcagcttggtccagagggcgactggtctaaaccaacatctccgttcatggttccattcttgcaattccttagcctaaaaaccggaagtcattcctgagggtctctttcactacgctgctatccaattcattagcaaatcccgccaggtcttccttcaaactacacccctccgcgtgcatctgctctctggaaatgccactcgatggtagcgaagctgctggctccatccagacggctttctccacaattgttttgtgtccttcccttttgtatcagttgtggtgttggctgtaagtgacaaggaccttgatctggctgaaggaaagagtgttggctcctgagactggaaagctgagggtaagtctgacgggcgcggcgggattgggaactcacggcatcaacatcctctctccgtgtcttaggcccactctccaccaggttgcttctctcccagactcttccctcatgggaacaaaatgcctgccagcaatgccagatgtacatcccctcaagctcccacaggacaacagggcgggcagcatccacttcccacagccaatagccctgggccaggatcacgtgaccggctgataggctcaggtctcagtcatgagttccacctttaaggaaggtgggggcagaaaataagtttccctcaagccctgtgcctgggattggggatggtggctctgcagaaggaaggcaagatgcactgaccagaggagggcacatggaggccaggagactgaacagcaggcggccacctcacctgttgcactgcccacccgctacctaagccctgcccgccccacccgcatctaagccccacccactctcccacacctgcagcactgcccaacccaccccatcaaaacaccgcccacccaccccatcaaagcaccgcccacccaccccacctaagcactgcccaccccaccccatcaaagcaccgcccacccccaccccatcaaagcaccgcccacccccacctaagcaccgcccactctcccgcacctgcagcaccgcccaccccaccccaccaaagcgctgcccacccccgccccatcaaagcaacgcccacccaccccacctaagcactgcccaccccaccccattaaagcaccgcccaccccaccccatcaaagcaccgcccacccccacctaagcaccgcccactctcccacacctgcagcatcgcccaccccagcccacctaagcactgcccaccccacctgagcaccacccaccctacacctgcagcacctcccaccccaccccaccaaagcactgcccacccccacctaagcactgcccacccaaccccatcaaatcaccgcccaccccacctaagcaccgcccaccccactacacctgcagcaccgcccaccccacctaagcaccgcccacccccgccccatcaaagcaccgcccaccccaccccacctaagcaccgcccacccccacctaagcaccacccaccccaccccaccccacctaagcaccgctcaccccactacacccgcagcactgcccgcctcacagagcagggccccacctgcctcagagtaagaaaccagcagctccaccacccctggaggctgccttggcgcagcactggaaacattcataagaacacagctgccttttccgagattcagaggttgctctggtgcctgtcacctgcccaggaatcctgctttccagcaaaggtgcctgtaattctaacttttaaagaatgtctcagggccgggcgcggtggctcacacctgtaatcccggcactttgggaggccgaggtgggcggatcacaaggtcaggagatcgagaccatcctggctatcacagtgaaaccctgtctctactaaaaatacaaaaaattagccaggcgtggcggcatgtgcctgtagtcccagctactccagaggctgaggcaggagaatctcttgaacccgggaggcagaggttacagtgagcagagatcatgccactgcactccaacctaggtgacagagtgagactccgtctcaaaaaaaaaaagaacaagaaaaagaaaaaagtcttgggattaacagggaaaaaaacagtgaccaggaccaacggctaaaatacatctcccccaactattctgtacatccacccagcaggaaaaatgatgcttctgaaataataatttctcatttcctggggctctaataaaacctaccttagacagcagtagcttctctgttcaaagagacgctggcaagtggtccatgttgttttcttctacgaccttgtgtggaggcaggagaaagatgagatggcaaagtctaagggatttcatcatcacaaggatcttctctctctccctttttccttctttcttggagtacttgatctctctcagttattacttataaattagggattttaatcagttttatgaaatcattttgaggattaaacgatcttttcaatggaaaatactgaggtcaccgcctgatgtgtagtatgtgcccagtaaatagtagggttaaaaaaaatcagtatctggccgggtgcagtggcttacagctgtaatcctagcaccttgggaggccgaggcagtcagactgccagagcttgggagttcaagaccagcctggccaacatggtgaaaccttgttttcactaaaatatgaaaaatgagttgggtatggtggcatgcacctgtagtcccagctactcgggaggctgaggcatgagaactgtgtgaaaccaggaggcagacgttgtagtgagccaagatcgccccactgcactccagcctgggcaacagagcgagactctgtctccagaaaaaaaatcagtatcatggtgagagcaagaattgttaatgtggaaatgttcctgccccaactgcaccctgacctccccaaactaattcaaaatgacgtgtttgccagatattttagaacaaaaaactggagaatggaacaagagagacaagatcagaaagatgggcccaaagcggctctaacccacctagggaagctgtcactctccatatgaagagagtggggaagtaaggagtgaatctggcactgctggaggtgggtgggtgtgaggctcacgatcagctgtgggtacaggggttgggaggggaggacagggaacttgaggagcgaggttacgggttgtgatgtagatactcgttgatactgtcttcgagatgccagtgaatgctgcaatagttgctggacggtgcttctttatacgagaccctgttcagagactgggacctgtggggccccagcttttcccagggcacactgctggttccctctggggtgcagggagcagaggtgcatgcaggttctctcagatgatgagagtttgtttcaggaaaaccctgggaagcaaggaagacagaaaacagcttaaaaggccagcatcctaaaagggggctccctggagatcctgggactccacagaactggcggcactttcctgctggagccgggcatgtcctctccccactcactggacactcaccattgtgagtcagccccagaccccctcttaagtgctcctttgtgggctccctaagggagtcggcctaactgcttggccatcaccaccagcactgcatgtccctggtggcattgctgtcctggccaagccatagatggcttctctggaggtaagcatctaaccctgccgtgggtgccataatgtgccacccagatcctccctcagatctgaggcacattccccaggctgctgggggtgttgatggctgatcattctagcagaatccttctccaggaattgtcttcaggttctgacagccacctgcctcaaagtcaggccccttcctggggtggcccatgtgcaatgaatggtcaaggaaaaagcagaaaagtccaggccccattttcccctattcatgaccttcctgaagggccatcttgactccagacttccgtgagttagctgaggtcttggctgtgacatctctaaagcccagcttctccctccctgcacacgttcatcctggaaacactccccagtgaccttccttcacaccaatttcacctcctaatctgcttccttagaaacccatctataacaatccctaggccaggtagctgtgagagaggcataggcctagagttgccagatttcattaataaaaatataggatggccaacaaatgttaattgcagaccaacaacaaataatatcttagtgtaaatatgccccatgccatatttgggaatattaatactcaaatattatttgttgttgacgtgaagttcaaatctaactgggcattctgtattttatctgcgaaccccagaaggatcatggagtagagaatataggatctaggtccaaatgggcctatggccacggcagacattcggagcatcacaggctcctgttacacacgagctcagctcggatttctcctgtaagaaataaaacaactcaaatgtgatgctatttttttgtttaaaagaataataaaaataaaaactaccatgtattgaggaccaactcaattccagaccatgtgctaagtatttcaaagctgttaatccattgttgacccattcaatcgtcacaactttttgaggtaagcgtatatcagttagcatcaagtccaataagagtcacagaaaacccaaactatctgtggtttaaagaaaatttagaagttcagaggtaagcaatgcaaggctgggattgggaaactccaaccctttcctcatgtttaaccctgtgtggtctatgttctcagggtcacccacatggtccaagatggctgctggagatccagccattacacaaaactccagtcagcaagaaggaagaagcaacaaagaaggacatcacccccctcccctttaaggacactttctagaaattataagagcacatgtttatgccccttttgacagaactcagtcacatacatgatctgggtgcaagaaaaaatgcaaaatgtgattttttttttttttttggagacagagtcttgctctgttgcccaggctggaatgcagtggcacgatctcggctcactgcaacatccacctcctgggttcaagcgattcacctttctcagcctcccaagtagttgggattataggcgcttgccaccatgccaggctaatttttgtatttttagtagagacggggtttcgccatgttggccaggctggcctcgaactcctgatctcaggtgatccacccacctcagcctcccaaagtgctgggattacaagtgtgagccaccatgcccagcctgcaaaatgtgattttttattccagtttgtcacaggtccaagtaagaatcagagtttttcttgctaaggaagaaggggagatgcatagtgagggacaatgatcagattttgccacaaatagatgctattcttgttatccttgcttttagataaaattgaggctcagaaagattaaataccttacctagggtcatgcaactcccagcctgcccctacagcctgtgcctgcaataaccactatcatataattccatttaattagatttcagagatgccaattacctaaggagggtccaatgacaggcaaattctattttttaaaaaaatctaacattcaaacaaattgagcattcagacatcacaactttgtcaaaaaccctaacgatcacagcaaatgtagaaaaacacaggagaaaaaatgtttaaactatacacacagaggtatgaaagagaagcaagaccagcttttgcacagatcaacagtccttccagagaagaaaaagcccatcacatgttccggaagccaatttaactaggatgatcacaaagaagaaacaagggagtgtaccaagtggcaacgcagccacagggtggggaagtcatgcttgaaatcactaagaataaaagtttgagcactggggcctgagtgaatattaaatgggctctgtgggtttaagtaatacaactcaacaacaccctgcaataactttgaactcttggatcttggggaaatggcctggggaatgagaaaattctccaagagaaatattatttgtattccatggttgtaaaagttaatagccctcccccattccaaaccatggcatcccaaaccagaggaagggaaatttgaaacatgtaatttagaagctgggctacaaggaggagagcctgacccccaagctaaagctgcctggggctttatttacacaggtctagaagctgagtggctctaactgttgggaaaatctttctgaaattccacaatttggtttaccttccccctgctaggatgaggttgctcacaaaatcatggtttcatagaatgcaaaaattaaaagagagcttagcgatcatctaaggctcagatttagctgggtctcatcttgaaggaactcccttaactgggaatagctgcctgggtcacagcacaatgcaagtgtgtggagctgaggctggattgagtgggacggaatgcttcattgtgattgattagtcatgtctgcttcaggcacagaatgataggcgaagcatatgcatcgaatgttttttcactgtaaacttggtgaaacccttcattttacagaggaagtaagtgaggctctctgagcgaaagcaaattgctctaagcctttttggtagctgagtgagaatgacaagtcagttctcttcagttctcatcctgtcttccttttaccattagcttctgtggctggcaactagaattttcgcaagagtaattcctaacagccattcatgctccactcaaacagaaagacctgcccttttaagggaattcatttccactttccttgattcccattcaggtctgagtgtggcacaattggaggtagtagtttaattttggtagtcgacatcctcggttggacaacagtaagggtaaccctgtgtgctgctataacaaataatccctaaaccacagtggcttaacactgaatgctgggtaaagaatggcccctcgcaggtgaccaggtcctaatttccagaacctatataatactttacatggtaaaagggactttgcagatgtgattaaagatattgggatagacagattaactggacctcttataacggtttttctaagaaggaggcagaagaagaaggagataagatgacagagcacagacaggggcagagagagatctgaagatgctgcactcccggctttgaagacagaggaaggagccaggaaaggcaggtggcctctagaagatggaaaaggcaaggaaacggattcttcctccagcctctagaagggaatacagtcctggtgagaccttgactttaggccttctgacctccagaactataagataatacatttttgatgtttaagaccaccgagtttgtggtaatgtgtacagcagaaactggaaattaacatacacagtaaaagtttacttcctgcccctctcacaatctaacaaagtgagaccatctcccaagtcacgactggggctaggcccctaccatcatcaggctctaggggtcccagggcctccagccaaccaaagctcagacagaagaggtgagggcagagatcctgcaggaggctccaagtgccaggcttcgaagtgacttccacccacccttcgtctggcaaacccatcccaccgcaccactgagctgcaagtgtctcctgggagcccaagaggagtatcagatggtttgagaaacacacggcatctgtctctccactcatcccctttcctcttcttgccatcacttcctcccccaattctttagtcctcaagagtcaagcaaacctggctctgatcccagcttgctactcaatagccgcaagcaactaactggacctctctgacccactgcatcgttatctataaaatgaggaagggggtaaacaattgttatcataactgtgaatagattataccattattataggcatatttttatataggtctaagagttaggtgatagagcataaaatgaaaacacttttccagaggttcttagcctggggacatcctcagaattgcacgtggacttttaacaaccacacataaggggcctccacaggtggcggctgccacatgggatgattccgcagctggatcatgactgctcagttcaaaggcaacataccgggaacctaatactggctctcaagacaggacgcagcatcagtcacttaagaagctgcatcgccctccccaggaatatttacattgtaaatttgagctccaaccgcaaaaacatcctgctaagtgaaagaagccagacacaaaaggccacagagtgtataattccatttataggagatactcagagtgggtcacctcgtgcagacagaaagcagattcgtggttaccaggggctggggcagagggaagtgggaaagactttttaacaggtatggggtttcccttcgagggatgaaaatgtttgcagctacaggtgatggctgcacaacagtgaacacacgaagtgccactgaagttcacgcctccaaatggttgattttacattatgtgaatttcacctcaattttgtttttaaaaagcaacatctctgcttcagggacatatttaaaggccagcatagccccagttggcctgaaatcaaatctcaatcctttgcctatatatcaaattgttcctgtgtcaacctaaggcccctacacagtaactgagacacaaggacagtcttccccggctgctgggggtgtcagtgaccaaggcctttggctgacaaaagccgtatccccaacatcacaccctgtcccaggaggtggtgaccttgtgcccattgacaggttatggggtagggaggcctggtctcttgctcaaggcaggacacctctgcaggagcacaggacccggttgaggcccttgcggtcaccacatccccatccatccccatccgcatcctctgtccaccttgctgacgtccccaccccactgatcccaaagctcttcccccagcaacctctgcagcaaatctccctctgagatttgccgggacacccaacctaagatgcctgcccaagatgagttctgctgtcaagttctacagcagtggtttcaaccaggcagcaatgtctcccacaagggatggagctccatgagacgtttttgtttatcaggacttggggggtgcaggtgctaccagcgtctagcaggtagaggctgggacacagctaaatatcctataatgcccaggaaagcctcactgccacaaagaatgatccagcccaaaatagcagtggggaggttgagaaaccctgttctagaacagaagctccttgaagacagggttttttttttttctttctgtcacacgtccagcacatagtagctgttcaatccatacttgcagaataaatgagtgagggactgaatgtgaaaacccaccagggcacctccacctctcctcaggtgacgtctcctcagaacagacttcactgaggcttccatactctgcctcctcttcccccgaggacttaaggctttctgtggtctggctcctgcctgccatttggcctcatttcttagcatcctcctccttgctcacagtcgtacagttttcttggccttcttgggtcctcaaatacacaagctcactcagcaacttaagggcatcaatcatggggtccctgcatctcagtttcttgcagggcaggctccttacctgatggtctttctaaaataaatcctgtggcccttctggttgctcttaccacatcctgtttgtttcctgcacggcccttgctatcacgcaaaacgacctttgcttggttgcgcattgtttgttctccgtcttgtctcctgggaagatgccacgatgcagtttttctccactttgctctgtactgtggaattatctgttgactggatgaatacaggaattggcagaacaactggtaccctggacttgtgataacgggggcccagtgaactgggcctcatggaggttcaggacccgttgaaagaaagaaggaagggtgggcctgctggggagaggggccgccacatgcgcactggcgtctgctaacaagggcaagtgtggacgaactcctgggggctgagtcatctctttctctgtagctgtgcgggaggcagatgccttcaggctgggcaggagagaggaggcccagaattttgtgctgggaagttcgaggcagagcacgggcagaatttgttgtcacagggagatgtcagccccacgccccccatgtcaaaggactcttaattacgctgccaaaagcaaggctcagtgctaacctgtgaccccaaaggtgtttatatttccctccaacattctcttttgatcatccccctagagtcaaaagtatcccaagtcttgaagataaactgttagttttatggggtcgcttttactcctaccagaaaataagacaaatgcaccgcacggtgtttgagggaagccatttgcatttccctgcctctctcctgctttgtccgctaccttctgcactggtggaggctcctctcaccacctgcacaaggctgtcctgctctttgctgcctgcttcttatccagattttacccaaactgaaacaaaaggaagcaagatgagatctacgtgcagtcaccctcacctgctggcaggggacagaagcaaatagttcttttcaagttagcaacgaactttcagaaatctgtaagatgtggctctcaaaaaaggtactggtgaaaaacctcttcttaacagagatgaaaacctgatataactgaatgtggaacggcaggggatggtaccatcctccgggatcatccattatgaggccacgctctgcagctgtaacaatggatattaggaaagtgtactcattgatctggaaagaggttggttttccatccaaagggaggtggcagataaattagtgaacaggactctagcagatgctgtgggggccctgtccttacccccttggccttcacttttcccgggtattagaacgcaatagctcccagtgccaggacatgctagtgctccccagaagtactcagggcagaggggttaacactctcctgggagcagccctcaggcaatgattaatggtaggagtgaatgcactgttcatctcctcaagggctaactcccaggcacctcctgaaccacctatgggaagcccccagtgaaactgacccccaggtgcccacagaagaaacctgctcccttctgtctgcccagctaatccttcttggaatcagttcccaattcactcacttgccaccctgggggttagaggctatagaaaggggcaggagtttgccattcctgatacaggaatgataagcacagagaggacatggggcgttacacgtgggctgccagccacacagtggaggcagtgcctgtgcttaggaatctgaatgttaagtacgcattcctgcccggagagattcccgtgctcaaccagcaatggagcctccgccaagcccacgccaccgagaccatggagctcagacatcagcctgctgcgaagtcatctggggagcatgttaagaggcttggatctggaccttacccagaaagtgggacccagcaggcatgtagtgggcccaggaataggcatattacacaaggaccccaagcagttctgagttacagggtgagaaacactggactggcagagtggcagtgtctagtgtccactagacagaggctgctctctaaagagagcacatgcttgtattcctgacggtggccaaggattacccatgtgatctcccctcggctgcccagagcaggggaaggagaaatgctgcctgtgtttgtttcctaatgctgctgtaagaaattattaccaacgtgatgggcttaaacccacagccgtttattgccgataagctgatgccccttctgtaggtgagaagtcccagtggactcagtgaggtctcggccttggatctcacaaggctgagatctaggtgtcggcagggctgagctccttcctggaggctctggggaggaatccagagctggaattccaggctgattcagtggctggctggattcagttccttgtgtgtgaaggactgaggtccccgctcctcgctggctgtgagcccggacaggctctgagaagctgctgcggtcctgtctgcgctttacatgtgcctcctccagcaatggttagttgagtccctctcatgccatgaatgtgacgtctcctgccacatctaactttggccagagaaagttctctgcttttaagggctcatgggattacattgggtttacctggaaaatccaagataatcccctactgtaacatccccaaccttagtcacatctgcagagtcccttttgttatgtaaaattacatactctcgggctccaaggattagggtgcggacatttttgaggggacattctgcatacaacaatgctgtatcacaaacaaagccaccagatttctggtcttcttgcaaatgattctttgcttcagggattatgtatctgtaggcccgagacggagaaggcaggaggcagaagagttgggcctgcgtggaattgagagcaaagatcttcctccataagatcaaggtgtgggaggagaagggccttccttgtttttcttctcagaatgctgtcatttaaggctgctctactcagagccttggcagtcatctggccaccatgatacagggccaagcacaaaggatggcaggccaggagtccagggggaggtcattgctgacttagttaagggagccaggcgtggtggctcacgcatgtaatcccagcactttgggaggctgaggcaggcggatcaccagagatcaggagttcgagaccagcctggccaacatggtggaaccccgtctctactaaacacacacacacacacgcgcacacacacacacacaaaattagccaggcgtggtggcacatgcctgtaatcccagctacacaagaggctgaggcaggagaatctctggaacctgggacgtggagattgcagtgagccaagatctcgcccctgcactccagcctgggtgacagagcgagactgcgtcttcagaaaaaaaaaaaagtcctggaaccatctatctccactatctccagacttcctgttgatgagattatcaaatctctactatttaagcgaagtttagatgaatgttctgttcctcactgatggaagcattcctaacagattcgtgtgatgtttgcaatagtttggaatattgttcaacacacagtcactcccctctcctttgcataatgagcagaatatgcctcttatcctgtttatggtgggcttggcaaagtgacttgctttggccaatgaacagcaatggatgtgacacatgcagaggccttcgaagtccttgcaggtttgggctctactcttgtgccccagtgatctgccatgaggagaatacgcccaggataagctgctgccccttcagcctgggccccagaacaaacacatgtgcggctgcatgagcccaacctgtgtcctataaccaaggccagcggaccctgagcctgaagcagagacctccagcagggccccgcttagatcacctgcatcatgatcaaccgctgtcactgttccaagaaaccgagcttagtaacggtgtgttatgcaacattgtcaatagctgacttgcacaatagtgaacatgcaagaggtccacacactcctgttccccaagaccctaaagtcacgtgggggaaagtgatagaactctactctggggatccaagagcacagaaaatctaggtcaagcattcatagaatacaggagctggcaaactccccacatctccctgagacacagaggagcaggtacagaagaaatgtctgcctgggtgcctggaagcctcacagggtttcatcggctcagaacgccccagtatccaatgaaatcttcccatgggccgggcttttaggctgctctgggagttgcggccaagcactcccggagatgctctgctctcaagatgcagagggcacaggtgcgactggtgagaactgaggaccactccagagggaaggaggcagtttccacggatgtctgggtcacctggagagaatccaggctgacatcactcgcatgcctgggctatttgggtctcccccaccccccaccacccgaactggagcaatacttagggaaagggagaacccaaatccgtaaaattaggtttctgccacttggaacaggggcttgaaagataaattaacttccattagacttatatttcttgcacaccgtagactgcagactgaaattcatgcccactgtggacacagcgaatgtatttagtccctgggtatagtggtcagcttgcttcagttctgggagtctccattctcattggactaaaccagagtcagcaaaccagggctgttttgctcaaatctggctcaaatctggcccactgcctgtttttgtaaataaagtttcactggaatagccacgcccccttcgttcaccgctacaacgacgggactgagtggatgcgacagagacggtctggcccacaaagctgaaaatatctattatctggccctttgcaaaaaaagcttgtcaacctctgcactttcccacctgctccaaatctcaatctccctgcgctaagctctgctttcattatagcaactcaaccagcgttggagaacgaggtacacagcattcaagaaacccagccctcgtgtggcccagggagctcttccccacacactacaaaattctccagacgtccccctccaatgagccaaagagatgtgactgcacagcactataccctctgctgcccgagatcaatgacttttcctcttaactgctcgcatggcctcatccctccttccctgagacttcttcccagcttccctcaccctggtgctcctcaggagaggccaaaatgagaagagaggtctccgagtttgagttccacacaaaactctgctctggccagactccgcccagcaccgtggatgccagcagaaaccccatgtttgtccccattaatcacaggcggaacctgcaacttgagccccgtccacccgaaatgagtggaaaaagtgcaacctgaccacaaaagtattattttataaataaggcccttcagtagtggttaattggatacacattttgtaagattcagggaacatgaaagctatcatactcacattgactggctgcgttcctgtgagactgcagtggccattttctgtgcaatgtcaggccccaggctgaaagtcctagcttggagacttttatttttcccttagggatattgcttctccaccccaacctttacaaaaaaaaagagcaagattgatttagtgtatgtttaacggctccataaatcactcaacatgccccaatgtcatcaaaattctgccagaaatgatttccactgaagcagatggcctgtatgggaaactaatctggcatgcttttatttccaccgaatttccatgagctcctactgtgtgtcagcgcacacctggccctggaagaggctgaggggagtgctccagtccatggccctgcatcccagaagagggaacgctgcaggagctggaaggagatgttcaagaatacagggaatcagcctggaaaaccgtgggctggaaggcctgcccctgtttgtctgagatggtttaaaattcacacccttcttacgaagacagaataagaaatccaaggctaattttgaatgctctctcctgctatgcttatgctctgtgggtagtctggggacagtgatgggacctagctatgcctgctacagagagatgactggacagacgggtggcaggttggggaggtggcctcccctccccagctggtgcgggcaagctgacaacagcccgcacctgttgaaggctcaccagggagggctgagggcctgatctccaaattgaatggtcaacctggacagccacacgaggccaagtgtctgcatttgcgtgtgacgtaaaccagcacatacaccagggagagagagcagcagggactgagaaatcaggagagcttcagagagaagcggggtggagttcagccgaagagaatgaatagatgggagaaagtgagaaatccattgtgctttcatgaccaaaacaactcttgggagcaacatgtcattgtttctaaggagtaacaatagtaataatcacagctgaagtgtactttaagagtcagtccatgccaggaagtccatatgcactattatctctctgatcactcaaaaccatcctaagaggtagttacgattatcacacctaattcacagatgaaaaaaccaagtctcttaagtttctcaacttttccatcaaaatgctccaggaagccgaagaaaaggagcctgtgagctgaagactcagaggagttccccaagtctaccgccgcaaatgcaaaatttctttgaagttctgttttctatattcccttgttttttttaccctctcctctatatctaatatcagaatgatgtgcttaattgtctttgagtgaaatttcacaaactttctcccctaaaatgcttctaatcaaattacccttcccagaggatgaaccttatttcttctgaggtttttccgactccttcacccactgacttggatcctgaggctaaacatgctccagtttaagcagctcaggtggggagcagggcttggacacagctggcctctggccccctgtttttgtttggcatgcatggtgtctttcagttttcacacacacacacacacacacacacacacacacacacaaatccagatttccagattcttctaaaattgtttccactgtggccacaattgtgtggctctgagtagcgacataggctgggtacaagacactagggagtgctggggactgtggcaaaactgccaccactccctagagtcttatatctagcctatgtcactctatatttctctagaccctggaggtgtttgagtatatgctcttgtcttggaactcttggtgtttcaggtacaaaatgcagaaaagccatggggtctcggtaagacagagagggctccaatcaaaagacatcaagaagattccattcacaaaatgaccctgcagagccatgtcagcacagagagggggaaaaaagaaccccagtgatgctcagtgaagcccttttattttccactctacctctgatgctgctcaaagtgatgaattagagaagctcatttcctttggttggaaaaaaaaaaacccagaaaacaaaagaaaaagccagtgttcaataaaacgtggaggaatgacgcaatggtgtgcagaaccctcagagcggagctgttaattgcttccttcccaggatgctggccggcccctttctcagggactcggatgcatttgtcaaggaaagtatcagccccccataactctccaaaatgatacaatacatcacttgaaagtaagctaggatcaacacgttgttaactgtttgatctcgcaagtcagaattaatgataggtattttgcacaaagagaaaaaaatgaatgttaaaagcctatttacgttaactaaagacatccctgcaccatcagggttgagttggaggcgatttcctgcggcacagctgttctacgtttgttagtctgcgggtgggtggcagcccagtaatcagagccagactgagggtgtggggagctgaagagatggggggcgggggtcaggaatctttacacagaaaatcccagtgaccacctagagaaagaggatccgggttagagctcagagtgcactccttcagagctttggaaagagctgcagaccagtttcttcatctgaaaactagacttcattcattaattctgaaaacgcttacagagtgtgggctgagcacagggggtccattggggagcattaaggaccaggtccttgccctcatggatcttacagtctagacaaaaaactttaaccaataaggaaacaaacagattaacagacaaaacttcaggtcatgataatactataaagagaacaggatgggatgtacccaaaagggaccagggatggggccactttagattgatggccagggaaggcctctctaaggaagcaacactggccttgaaccctggatggtgtgagccaggcaaacactcaggggcagagtgttccagcaaaggctgtggccggtgcaaaggccctggagcagggacaggcgtggagtgctcctgctacagcaaggcagtccctgtgctggaaccaagggagggaggagagtggtggcaaaatagggaccacaatgtgtacggctctggggccaaagagtctagctattactctgagtgtgaaggcatccatttgaagattctgagtaggagagtaatgagatttaatttgcgttttaaaaatctctctggctctggatggaaaatagattgtgggccagcatggggagaggagtcaagagaccaggtatgggctatgggaggtgtccaggcggaaaggaggattaaagtagatgaggccggcagcccagggccagcacacagtcagtcagggctggcaagaggacagagcaagtgaagcgttcacctagagtgcaaaatgtaagatggggagaaggaactgccaaaaaactcggtaatcaaaataaataaagacacaattcgtattaccgatttttccttttgcctcaggctccaatatggcttgacacggcgctgcgaatgaccctgtctttctttaaaatgctgatattttgttcatcatggaattttgggcattaattttgatttttaaatgcattgcattaaaatatcatttatctggatgactttttggcaccgccttaaattctgtggctgaggcaagtacctccctcgtcataccctaatcctgactctgcactaagtactcagcaccctacagcgattgaggccattgctgttgttttttggcctccaaacccctaagtaaatgcgtaggtggacaccaggggaggcaggtgcaaggtgggttctgcaaccttcccgtgttcccagctgacctgatttatgatgaaggtgggaatgaacaaagccatcttaggagtttgtcggtggcagattctactcccactgagctcaagctgatgcgaaatttgtgggaaggagcctgaggcatctcagaaaatctccagccccaggctctgtgtctgtcagggcaaattccccaggaagtgcctctgattggcccagtgtgggtcacatgctgtctctgagccaaatcggctgtggccacccaggcagcgtggtggtgcacaaacatggctgccaagaggcccaccctcttgggtgggacagttctccccaaagagagatgtgggctgaggtggggaaggggttgtactcataatgttgtctgttcgtgcaacagtatttcctgctgccagggagctggagttagggtttagaaaaggctggggaagtttagaggaagccgtagctgagtagcgaaaaggggagttgaagaagccctgaacaacatcttcccgtcgtcgccttcttggaaaagcaagcccgcttctcctgtgcgccttgcccgctctgacagtgagggaggctccctcgagcaccctttaatttctcggattattcaaatttgccatgcccacccaaacaaatgggaggttttctggagagaaccagggtccatcagaggggggtatcaaaaccagctcagctctccagtgtgggaaatgagtttctaggccaccagacagcttcctaccaagcacagaaggcccgtcacctctccacattcaagtgacggaagtggaggaggaatgaaccacaggaaagcagaacaagaagcaactggtctccttgcgatgttcagtgagagttgaacatcaattctgttaccaagtattggttcaagtgaatcaaagtcatgtctagcatctataatttttttttacattgcaaaggattttcccctgtaagagtttattttggtgtttcacaaagggtgttctgaacattcctggtagcacgtgagatgattttaggcgagacaccaacaaacatttttattttatttatttatgtttaaacgtattttaaaaacatagcaagcatatcacacatgacaaagacaattgcttaagtcggggctaaagtaagtatttaaatgagaaaaaaggggtacggttgatttaaataaaatgttaaagaataatacagtcatttggttggtgaaggtaaaaattgtgaaggtgagtgaagtttggggaacactggctcagctgacggccacaagttctggagaagccatttgatctgctgcgattgtctccaggtgacagatgacagagtggagacggagagtggcaccaagtatgtgcctcaagttacacatacacccatgcggggccagggcaaaaacactggattttattttatgttattttatttattttattttttgagacagagtctcactctgctgcccaggctggagtgcaggggtgcactctcagctcactgcaacctctgcctcccaggttcaagccattctcctgcgtcagcctcccaagtagctgggattacaggtgcatgcccccacacttggctaatttttgtatttttagtagagaaggggtttcaccatattggccaggctggtctcgaactcctgacctcagtgatccaccagccttggcctcccaaagtgctgggattacaggcgtgagccacaatgcccagcctggattttaagcttagttcaaaagtcttttcactccctcaaactgagacatcatctgtcactctaaaatgtgatctttgaaaactcacgccaatgtagtatttctcaaaactgctctagaaacagagaaaatataataaaatgtaataactgtctccttttttccattggtctttctatagcagtggttctcaaccaatgcatattttgtttccaggggacatttggcaatatctggagacatttttgatgtcacagttgaggggtggggaggcaggtggtggatagagaccagggatcctgctaaaagcttcctataatacccaggacactgccctcccccccgccagacaaagaagcattcagccccaaatgtcaatagtgcccaaattgagaaaacctggtctataatcaccatgacccatttcattcacaaagtcaaatctcagactgaaggatcagaaatctgtctcctggctggacacagtggattacacctataatcccaccactttgggaagccaaggcaggaggatccttgaggccaggagtttgagaccagtctgggcaacatagtgagactctgtctctaaaacaacaacaacagcgacatcaacaacaaaggaaagctgtctccctgttgtgctcgtgacatttgctcagaaattaacattttcgtggctgaaaaaaataggaaatgttttctcaggaatagttgttgtataataatatctctaatacacactagcatttatggagccctcttgctgtgccagacaccagcccaacaactttgcatgaaattctcacaaccaccccatgaggtaggtacagatgaggaaactgaggcacagagaggttaagccatttgcctgaagcgccacagcctctgcttcagaggcaggatttgaccccaggcagtctggcttcggagcctgcactgttattcaaaacagtatgtagtctatgttgtaagattatatattttctatgggacacactttaacgactttcattattaaatgggaaaaagaatgccacacataagatttttatttttcctgagtcggtcttcatgaagaaagaggactcaccactgtttcatatcattctcctttactgcagttacttcccctgcaatttccctgtttggccttaatttcctttgagtcctcgagtgccacgtaaactaggattggaagagttcatggagagggcttctgttcagcttcccaggcccaggacggactgccggcttcttggagcggagctttcaggcttggggtacacggcacgctttagaactgtgcacgtcttcacttttatttcccgggagctaagttcagctggcacttcttccatgccaggggctgtgcaaatgcttcacaggtgtgacttcgtttcaggcccaactcttttttttttttttgagacgaaatttttgctcttgtcgcccaggctgaagtgcaatggcgcgatctcgactcactgcaacctcccccttccaggttcaagcaattctcctgcctcagcctcccgagtagcggggattacaggcgactgccaccacgcctggctaatttttgtatatttagtagagatgggggtttcaccatgtggaccaggctggtcttgaacttctgacctcaggtgatccacccgcctcggcctcccaaagtgctgggattacaggtgtgagccactgcgcccggcctcaggcccaactctttactttttatttatcttttgttttctagtgaggtaaaattcatatgacaaaattcactgttttaaccatattaaaatgtacaattcagtggctttccatgcatttacaaaattgtgcgaccgtcaccattatttaattccagaacatttcatcaccccagagagaaatctcatatccatcgagaagtcactgcccattccccgcttcctgtagcccctaacagccactaatcctctttctgtctctatggatttgcctgttctagacatttcctataaatggcattgcacaatatgtggccttttgcatctggcttttttcatttagcagaattatttccagggttcgttcatgctgtagcaggtagcaggacttctctcttttttacggctgaaaaatattccatagtatggacagaccacagtttgtttatgcactcattagttatggatgtttgggttgcttttaccttttggctattgggaatagttttgctatgaacattcacatacaaatttttgtttgaacacctttgaagcataattaacacttgtaattgtcttggacatatatttaggaggggaactgctgagtcatacggtaactctatgtgagacacagttgtgggcccactttacagatgagaaatctgagtttcagcgcaaacttgcccaagatcattgagtagtaaacattagggctggaatttgaacccagccacaaggccataaccactggtctccccatctgtcatcagtgagccttgggagaaattgtagatggagttatggcaagaaaaaaactcctcatttgtctaatttaacttttgtaatttcttgatttaattttatttcactatgaaagtaatgtgtgaccaggtgcagtggctcatgcctgtaatcccaacacactgtggggccaaggtaggaggattgcttgaggccaggagtttgagagtagcctgcacaacatggtgacaacccatctctatttaaaaaccaacaaacagaaatttataaaagtaatgtgtgctccttgcaacacgccaagtgattttttaaagtgactatattaaaaaaaaaaacaaaccacacacacacacctggttcgaggtccacatgcactaagcagctcttacttttgaagctgttctgtatcctcagaaaagtcagtgatagagcagcacacggacagagtgacacctgaggtttcatcagactaacccggggaaggggcaattgccccacagtggcctagggctatgctgttcccacagacaggagtgatgggggcgtcaagggctggacctgaaccatcctgggaagctgttgttccctctgcagccacagaggcttggccaatagtaggggtgaccctgagccaatagcatcagctcccaggtgagggcaacactggccgacatatgattattagggaaaccgccatttttttcctcttttgctttagatgaggaaactgaggttccgggaggggagctgacttgcggaaataacaaggaagtggctgatctgggttccaatccagctccttctcaccttcaatccagggaagcttattggctacacactctttgctttcacactcatggtcacatttgattcacaacatcctgggtaggttcttttattatccccattttgtagatggggcaactgaggctcagagacagggagtgatttaactgaggtcatttagctaaaggtggagcaaggcttgaactgagatatcaggtctgagcctatctttattgcaagaaagcattctctggcaattgaggtgtttactaaatgcatttggtttgttttgttgttgttgttttgttttgtttttgtttttgttttggcttttcatcccaatgttaaaagcttctagcttttcaccttgattagctcaatgggctttggtaccatacagacaggccttggtccaaaccccagctctaacttaggttgttttttgttcggtccttcaagatgcttgctcctcctccttttctttttaccgccctacctttattgtcagtggtcacaaaatgaccgtgtatcatgtactttgctgtgaataaaaactgaacaaaaaataaagagaatatgattaaaaattttaaaatttgcttgataagtcaaactaaatcatatctattccacagataaataataaaggaataatcaattagaaggaattagaaagaatcaattagaaggaataatcaaagagaaggcatatctattccatggataaataataaaggaataatcaatctgtgtaaacatccctcatcctgccagaaacagggcaaagcattttctacgtattaactaattcaattctcacaataatactttgacctaggtatggtttttgttctcatttcatagatgtagacactgacacacagagaggttaagtgacttgcctgagatcacacagctttcaattgccaaagctggcatttgcaatccaagcagcttggccccagagtctgtgctctcagctacctaggctcaaaactgctctgtagaactacatccaccaggatggcaaattctatgagttcatgtttaaaagtaggtcacaaatcagcatggctgtccctctttgttttaaatttatacataatattactttttttgtaatgttgactgtgttgggtgccaaggcaaacacttttgagtatattgcttagctgaatcttcaaacagccctgcaagtagggcattgccacggacatattcaaatgcagaatgaaggctcagaggggctcggtcactcagcctggagacacttggcctgcagaatgcccatgtgtggaggcactcactggctgatatcacacaactgcttgcgggagcttcaccacgggctccatgaagcagctagaggccctagctggagactgcaaccggcggatgggtggtgtgtggcctattctagcctagagactcaccccacccgcccttgcccgctgctttgcaaggatgttttgcaaaatatttagcaaggcacggatggagcaggtgtttggaagtcctcactgtgtgggtgctgcttttttggatgctggatgtggggagcatctagggcaatggggggaggcaccagcgggctcagggccaacgttgccaacttgcagcttttcattgcggccacagtgaacaccagccctgttcttttgcctggagaagaggctgggtgccagggtttcctgtctcccctgggaagctgcctccaagctctgactctcactcccacccccaaatatgagctcccaatgggaagactgagtctggaggatactgggatcatgagcagctgtggagaagtggcagaagggacattgtggggacaggctcagacgcctgccctgccatgtgcatgccagatgcaggacagggaacaggaactacatcaaagtggctggagcgggaggggaccgaggaagtgtatggcacggtgacaaaaaccgaagccctgaagaactggggacagcagggacggtggtctgagcaggtccaggtccaggacggtctaagaacttgggggaactcacgcttcctgcatctcccggccggaggggatgggccaggctcacgggtcagtgggaccacagcagggtggcagtgccagctttgcagcagggagtgtgtgtggccaggctatgcagagggcggcagcacaggctctggaccagaaggcctgggctggaagcccagcctcacaaatcactgggaggtgtagcctctccggctctctgggtctcagtttccctgtctacaaagtaggaacaatggtgcctaccatacggtgtcgctgggaagcgagggtgagttcagcacaacatgtggcgcatagcagcactctttaaatgttatttaagcactgggagtcacccttgactatgatggacagagttctggataaatacctcagccaccatgctgctcggaagggccacactcttcctcagagttccccagcaagagggaagctccgctctccacaagcaatggcctgcccctgagcgcacccttgatggattcctccctttcttgcctcacttccctcctcccctgcctcccacacgcactcctcattgcagactcaagatcagctgagcctcatagatggctcagaccacgctaacagcatcagccctcgatgctgtcggtcagttctcagtgggatccccactctgccacttgtacctgcaaccttgggcaagcaaggcaatgcctctgagcctcgtttctcatctgcacgatgcagactggagtggcagccaccccacaggccaggtgtagagactcattacgtgctacaggtcaagtgtctagcacagatcctggcacacagtaaccactccacaaagattatctattaatatttctatgacaggagattagacccaggggccgctctatgggcaagagcgctctgcagccactcagggctccatgcttggtttaatgctctcctttcgctatcttgaaatgcttaaccattttttaattaaaggctctgcatttctactttgcactgggccctgccaatgatgcagctggtcctggtgagtgctctctgggcttcagtttctttaactgtaagatgagagtgataacacagtcaacctaccctgcaggagcataatggggcagaagagtgtgtgcctataaaagtgcttcgctaataaaaagacaaacaacccaattaaaacattggcaaagggtctgaatagactgctccaaagaagatgtacgaatggccaataggcacatgaaaagacactcgacatgtttagtcattatggaaatgcaaatcaaaaccacaccaactacagtggctatggtcaacatagccagtgttggccaggatgtggagaaaccagaacccttatacaatgctggtgggaatggaaaatgatgccagcccctttggaaaagtctagcaagtccccaagaatagttaccatctgatccagcaagtccatttctaggtacacacccaagagaaatgaaaacatatatccacacacaaaaactcatacacaaatatgtacaacagcgttattcataatagccaaaaagtggcaacagccaaatgtccatcaactgatgagagggtaaacaaaatgtagtctttccatacgatggaatattattcatccgtaaaaacaaaggcagtactgatgcctgctacagcatggatgaaccctgaaaacacgatgctaagtgaaagcagccagacacaagactaagtttccacttatatgaaatgtctagaattagaaaatctatagacacagaaagtagattagtggttgccaggagttgagggtaaagtgggtagaaatggggaatgtcttcatcagttcgggctgctctaacaaaataccatggactgggtggcttgaaaacatcagaaatttatttcttgcagttctgcaggctgggaagcccaagatcgaggtccagctgggtcgacttgtggtgggagccatcttctcgctatatcctcacgcaaaaggccaggggtctctccccagcctctttgataagggcacactaatctcaatgaatcacctcccaaaggccccacctcctaacaccatcacactgggagttaggatttcaacagatacattttagagggacacagacattcagtcataacacagagtgactgctaatagatataaggtttcttttggagttgataaaaatattctaaaagtgaatgtggtcgtggttgccaactctggatatactaaaaatattcaattgttcactttcagtgggtgagttgtgtggtatgtgaattatatctcaacaaagtgagagagagcagctttatatatctctacatatgacacgcacatatatgtaaatagagacatgtgtaagtttaaaagtgctttgcagactctaaggtgcagacacctataataacacatgatcacagcacagtcccgtgcccacaccatgcagacacacatgtgcacacacacgcacgcacatgcacacacacaacacacacacacagacacacatacatacatacatacagacacatacacacagacacacattcatgtgccctggccgcttgagtgcccaacatgactgctcccccgctgggttcactgtatctagtcctcattcttgggaaaacacattcactgccaactcctgcggggagagaccccaaataaatacatcagcgaggaggaatcaggggccctgctggggcatcttccctgctgcttactccaccctgcatgaaacagaggtcagaaagagcaccaagtgggacaacatgtgacatggcccttccccagggcaggatcagctttctgactgtgccagaggcagagtcgtcatgccttggttcagaatgtggatgatagaaggctcaggacagcggtggccagatggagagcttcccaggacagtcaacattcaaataaatttgtggtgactcctgtggggtggtcttcacctccctcttcactcctaccccagtgttaaggtgtgtccctctctgatcttctgattctcacctcatagctgcaagatggcagctgtgcctccaggcattacatccacgttccaaacaggaaagaaagattgaaggaacattaatccatgcctcaaaatatctttccagatatttgtgacagggacaaaaatctgacaaatgtttgaacgctccttcttttacttatgcactccacaactaccacatccaaagaggattttctatttcacctgcccaattttctgctctcttcttctccataaacagcccagcctgtttctgggcctttgagaaaatatgaatgagaattgatggatagggacagagagactggtgaggtgagagtcacaggaaatgaggaactaactcagcttgcagaatctttgaggttgtgttagttctggtcctctgggcttccaccaaacctgtatttacttctaccatatcaagtatttgatttcttctattcattcattcattcaaacattccttccttcattccccttgattcatacatgaattcatacattcattcattcattcatcatttattcatttatacattcattctacattcatttatacattcatacattcattcattcatacatttatacattcattcatgcattcatacatacatacattcacacattcattcatacattcattagctcacgtacatgctcatctatttattccctttccgatgttaacaaaaaccaaggggctttacctcttcagctgcagtgtgattgcctcatacttgtcagtgtcctccatgagacttgagctccttgaatctctcaaggaccaggcggctggtgtgctgcatgtttattagacaatggaacggatgcagggaccacgtcatgatgcttctccgggaaggaccctggctgggcaaagctcaactaaccagaaatctctggatcggaggaaatggggatagtgaacattccagtcacctttctccatgatcccttgatggtggatatcttgctgagataccttgacctgtctctctgccatggtcaagatccatgaacttgattgacttgactggatctctcgttagcacctgtggctcttacaaagcttagcacatctccttgagagtggaggcggatggagaggcttctaggagattggctggactctgccctctcccaggacctgctggccctcagcttgttctccacgtgttgtgaagagtagatgtgtcagtgcagggcaggggtagagcagaatctgttcaatgggtaggctgatgaattgaatgccaattaattgtggtctctgctatggtttgaacatggtttgtccctgccaaaactcgggttgaaatttggccatgttgggaggcggggtctagagcgaggtgtttagggcatgggggtggatcccttttgaatagaataatgccctccttcagaggtgagtgagttctcaatctccaggaatggattcactcccatgagagcaggtggttaaaaagagcctggctttctcggtctcactctcttgcttcctctctcatcatgtggtctctttgcacacacctgctctcttcctcttcctgccatgaacggaagcagcatgaggccctcaccagatgcagctgcacagtcttgaaccctccagccactagaatcttgagccaaatagacctcttttctttagaaatgacccagcctcttgtattcttttacagcaacacatgtggactaagacagtcttgcttagctgaaggttggctcgcggtctgctctttcctgcacctcccaaatcagacagtggccacctacagcagagcagggatacgttccactgacacagagtcgattgtgtttcttgaagaataacaaaataaacatggtaataataataaaagccataatcatagtcaccgtgtactttaattatgtgcatattatcacaatatgctaagcacatgacatttatttttcttttacatcttcacaacagccctatgaagtaggtgctataattacatccatttggtagatgaggaaactgaggctcagggaggtcaaataacacaggcaatgagtgggtggatgtgggagctaaccatcaaggcacacaccagatggtcctctttccccaccagcccctcctctgccatgtcaccctcctgcctgccctccagcaactgccttgcactgggctttccttcatctctgtgtaaattaacttattctaacatgtgagtgactgctaagctcaagtcatcctaaagatatttgcctttttaagtcctaatccaaatgtgtactttattagtagaatgtggagaagcaccaaccgaataacagggcatctcctgatgccatccttatggcatggggtggacaggggtcctgagaaaggtcagctgcctcccacttccagctacaagccccactgcagcagagatggtgagaacaccacctccagccctgcccttggccgtgagtaagtcctcccagacttttccatggtggttgttaatcttcagccctaacgaccagcctgctctctgcacttccaggtcttgtttggactggaaccatttgaaatgctgtcttataattacagaggttgcgcgggcgggggctgtgctgccaggcggccgttggacttgcacgtctctgctgcagccagcaatttcagtaatgatagtcatgcacaccgtttatctttggggtttccagaaatacagggacttttccagacactcacgggtgtctgacatgagtgattccgtctgcatcgttctctgaggccatgagggcacgcttcctgaatgagctgggatgctgtcaggggctgtttggggaacactgaacgcgaacaggttcagaaatccatggagcaaaggagcctcagacatcatggctgatgaaagggtctcccctggactgaggagtttcctgggaggtaaccagcgagtcctggagaaacctggacaatttttaaaaccagtgagtcctggacaaacctggacaatggatcaccctgttcgcattaaacacagggactggaacacaggcatttttctttgctccatccagagacctttttataaagggaacaaactgttaagcaaaggtataaacctcatgagcaataaacaggaaaagaggaggtgacagcagcagccgaagggccccgccaaacgcaggaaggtggagagcaggtgggaagggaccccccatagccccacggaaaagctggccgttaagaagcatgggctgggggacaacagcaggaggcccggataatcaggcccccagtactactgccttcccagaagttgctgggaggactgccccgcagaggcattgaacctgagtctccaaagcctgagatgccagcacagtgaagggtggaggtgaccctgtggtgaaaacaggacctggggtgtgcggaggacaccagcctcccatcacatggaaccagaagctgaaacccataagcagaaaatgatggaaggcgcaggaagcaatgatgatgcagggaaaggaaaagcgagaaacatttgtcaacgaaaagagtcaaactccgtacaatatttgaagagatttattctgagccaaacatgagtgatcaatagcccaaggcacagtctcaagaggtgccgagaacatgtgtctcaggtggtggggctacagcttggatttatccaatttagggagacattagacatcaatcagtacatgtaagctgtacattggttccatccggaaaggcaggacaactccaagtgggggagagggccttccaggtcataagtggattcaagaattttttagttggcaactggttgaaagagttgttattgcctaaagacctagaatcaatagaaggaaggctctgggttaaaataaggggttgtggagaccaagattcccattatgcagatggagcctccaggtagtaagattcagaatcgattgtaaatgtttgttatcagacttaaaaagaaaaagtgccagactcttagctaattctctcctggatcaggaataaggcctggaaagggaaggggattctctacagaaggcagattttccctacaaaagacagccttgcagggctatttcaagatatgtcaaataaatgtattcgaggttataatatttagatttccttctttatctgtcatgtgaggttatgccagcgtcaggttggaaagtgagccacattacacagggttaaacaagacagctctgacggtttgctgagggggactccccacgcctcttagataggaatctgggcaagagaagaaaaaggtcagactttaggctacacattgttaataccctcacagagacaaaagattgaattcatgaaacaagaaggaaacgctatttttaaaaaagaagatccttcagagaagcaagtgttcactctcataaaattattagtcaataggacagtcagaaggtaaaggtgaaggaatattccaaaattttgcaaaagaacatgggaatagaaaacaagaagtaagaggtaagaaaattagaggctccatcctggaacccaacttccaacttgtaggagtttcagaaaaagaaaacagattgaatggagggagaaattatcctaatattaaaattcttcagaaaactgaaaagaaagaagatactacaggtttttaaagggaaataagggagaaagttttacatgcaaaagaacagaaatcagaatagccctgaattggcttaacagcaatgctagaaatattgcaactgtgaacagtgtagagccaaaccttgtttgccttctaaaggaaaattactctcaaactagaattgggttgactagtatgagataaaataatgaagtttccagattttaaatgcttcacaagtttgcttcccttgtatctctttgcagacatctcctggagaacttgctgcaggcacacagcagtgtgagccatgaaggaggaaggcacaggatccaggaaaggagacctgtcttaggagggaagcaacagcaagttccatgagaatttgaagagaagtcctgttacaggatggggtcctgatccagaccccgagagagggttcttggatctcacacaagaaagaattcagggcaattccacagggcaaagtgaaagcaagtttattaaggaagtaaaggaataaaagaatggctactctatagacagagcagtcccaagggctgctggttgcccatttttatggttatttcttgatgatatgctaaacaaggggtggattattcatgcctctcctttttagaccatatggggtaacttcctgacattgccaggctgtttgtaaactgtcatggcgctggtgagagtgtagtagtgaagacaaccagaggtcactctcgtggccatcttggttttggtgggttttggctggctcctttactgcaacctgttttatcagcaaggtctttatgacctgtgttttgtgctgacctcctatctcatcctgtaacctagaatgccttagctgtctgggaatgcagcccagtaggcttcagcctcattgtacccagctcccgtttaagatggaattgctctggttcacatgcctctgacagtcccagtggtacagccagcccgggagccacggagagagaaccacaagaaataactgaaaaaactaaaacaaaaagaaaattactcaataagttacctgatgtgtttgtgcagagaaaattttagggtacttttcgatagttgggggaagacataatgatggatccaaagaaaattaagcagactgttttctaaaggcaattataaactccaggaaaaacaaaagcttgtgcaagaaaggaaatgatgccataaaatactatatggtacagagataaacaatatttatgtgaccataattatgtaaatactaaaaaatcactttaccaaaaattatgatcagtatatcaagagcatgtgggagaagtctatatatggaggtggtgtaaggttttcagtcatcatttttcatatgagtggtcaataaatatttcagtctcttcaggctgctgtaacagaataccacattcttagtgatttataaaactcaccaagaaatttactgctcatggttctggaggctgggaattccaagatcgaagctccagcagatttgatatgtggtgaaagtctactttctggttcatagatagggcctttttgatgtgtcctcacatggtagatgggatgaggggtctcactcaagaagagcactaatcttattcatgccctcattccttaatcagtctccaaagtccccccaccttttaatcttttttttttgagatggagtctcactctgttgcccaggctagagtccagtggtgtaatcttggctcactgcaacctccgcctcccaggttcaagcgattctcctgcctcagcctcccaagtagttgggactacaggccggtgccaccacacctggttaatttttgtatttttagtaagcgaccagtaccccaaggtgatggtattaaaaggtagggggaccggctgggcgcggtggctcatgcctgtaatcccagcactttggggtgcccaggtagatggatcatttgaggtcaagagttcaagatctgcctggtcaacacggtgaaaccctgtctctactaaaaatacaaaaattagccaggcgtggtggcactcgcctgtaatcccagctactcaggaggctgaggcagtagaatcgcttgagcctgggaggcggaggttgtggtgagccaaggttgcaccattgcactccagtctgagtgacagagtgagaccctgtctaaaaaaaaaaaaaaaaaaaacaaagaaaaggaagaaaaagaaaagaaaaaagaaacggataaaagagtagaaataaaaaggagtttcctctggaggatatgagtccagattcaaagatttcatcaagtgtctagtacaagaaattgcaaaatgatagataccagtttgtatccccactgggaggaggagccggtggtggagagcagggtaggacacagctgctttttattatcaatcttgtattaaagtttaactttttatttactgttgtacacatataaattcaatttaaaaagtaacaaaaggacagttttctacagggaaaaaaagtatcaaaaggcattcactggtatatacaccccaaaaccatggagtggcctgctttcaggtacagctggattcagcagctcaaataatgtcaccaagacctaaggtggccaactcaacctcatttgcctgggactttctcagttttaacacttaaatttctgcagcttgtgaaaacccatagcatatcttgtctgaatattcatgtcccctcaccccctgcaaattcataggtggaaatgttaactgccaaggtgatggtattagtaggtgggggactctggggagtgattagggcgtgaggacagagcccccatgaatgaggttagtgctcttatttttagaaggctcaagcgagtcccctcaccccatctaccatgtgaagacacaccaaaaaggcactgtctatgaaccagtcccaggcaaaccacagtgtcagtctcctcgtcagggccccgttttcctctttctctgatctgctttctcagcgtcagcagcatcgtgctcagatcccccgcaaggtggcccttcagcaacatggtgtgactctcctatcccagatactgaccaccaccgacttctctgctctctttaaaaagcgtcttactccaattttattttcaacctcctgcttttcacgtttaagttttgtagtaagtcttcctcaaaaccattttttggaaacaggccatctataaatcctaaataaataaatgcctccctctccttcccacagctgtcgtggtgtgggaagagcgcagaacgagctggcaggctccctgatcggtggggaccaccagggcacagtgaattttttagcctgaatgatcaggtttgctcatctacagtggccagagagcaggaaaacggccacatctcctcctcgtgctgcgctcagtggactaccagtaaagtcacttgtttttattttaattcacccacatccgggcttgggcacgaggctctttcctgggttccagttcaagttctctgatcaagaggccccacgtttgtgatgttcaaggcctggagcagaagccaagaggagaaaaacaaattgctggtctgtgggaatagaatctaggttccctcttacctgggcaggggaaccattccaacaggcagaatagtgcgggagttagcagcaggagttggggtgggacaaatccggccttagaccctgcactgagctgtgagcccctggcaagttactgtctctgggccaatccgcttttctcctgggccatcgataagtccatccggtgccttcgtgtgggaggaggaagggtcctacctttctgggtaaatgtgaccccacacacaccttgggagtggagctgggctgggtttcagcacccactgtcagttggagccaataacagcatcttcccttgcaggctggactgtgataaaggatggaagtgctcaggccacacctggctcatggaaggtttgcaatgcacggcagcaaacaactagcagagagcttgccccttttctgtttctaaagttgactgtgtcctcatatacttatgtgtgattgtgaagccccccaaacaaattcaaatcagtaaattcaaaattcaataaaatagctcaccagaaaatgtaaaatgaaaaagacagtatcacacagtggcaaggatgttgagcaaatgggtcttccacatgctgctagtaagggtgtaaaaggttcagccaccttggaaaacagttaatgggcagattcaactaaagtggatcatttacatatcctatggtccagctatgctattccatttctaggattagacccaacagaatcacagacataagttcaccaaaagacatgttcaagaatgttcgtggtagcattttctcattagcaagaaactagaaactactaaatgcccatcaacagtagaatggagaaaccaatttgctccattcacatcatggaatattatacaggaatgaaaatgaatgaactgcaggaaacacaactgcattggtaaacctcacacaaacacatcactgagaaaaatttcagccacacaagagcatatattatgttattttgttaacataacttcctaaaacaggcaaaaccaatctgcagggtgagaattcagagtagtggtttcccttgcagaggaggggacgaaagctatcaggggcacaagagcacctctgggaaccacgatgctgtttgctcatctctctcaggtgcggagggctcactttgggagtattcattcttataatgttgtgcccttttgtatgggtatcacatttcaatagaaaattaaaaataaaatacaatcacataaacaggatcatggttcccctgtgaacaggggttgtggggactgggttcacggtgacgtcccttgttgctctggtctcagctgaaatgtcaccttctcagagaagccacctctgaaaactgtccccaagcattgtcgcaatcgccagtcctctgtaaacatccacgagggcttgtttctcctgagcggtacttcctttggggtgggctgtcttgggcttgtttggttgtgttggcggatgatgtctcctctgtctcacctcccagacggtgagccctgagagtggggccttgtctgtcttgcttcctgctgcatgctcgtttctagaacagtccctggcacagagtaaggagctaagtgagtccttgtgagtgtggatgttgaaagggctagtcacacattgatcaacagaacagaggcgtggaaaggcacacacccaagtcaggttctggggccaagcaagccctgagcagacaggagcctcagaggcctgggagatgaggccgcggggtgggtggttgaggctagaccatggtgtgagaggccccagggcctcagggccatttgagaacccaccatgaaggcaataggaggccaccaaagtgtcttcctgctgaaaatatatttttaatttttacatattttttacatatttatacttcatgtatacgtatttttctgattctataaatatgtactcattggagtcttaaaaccacagaaaatcataaagaaggaaataaacatcactgataatcccaccaacctcatataaacaatattaacatttcgtgtttttttctttcagttttatttatttatttctatacaaaacccagctgtgatcaaggtcctgaatcccaggcattgaggcagaaggagatgccgtgccaggtggatctggaagatgcagctgcacgtaggactggagagtagctgggggaccgccaaggaagaggctgggatggagcccaaggagtgggctgggggcagtgaggccggagaagagggtccacttggacttctcaatggggagcagattggatgggactgaggctggggtaacgggagaagccaggggccagtctcaagagactaggagatggtggtgcccaaaacttggggaggggagaggatggctgcagcttcatgcctgttgatgtcaaggggccagcaggaccctgcatgaagacgtccacgtggccagaaaggcaggctctgccggccaaagcgaggagagagtgctcacgattcattataaaagtgaggaagtgtcctctgagcacgcctccaaggcggttctgcgcagctcctgctggggcagctgagagcgaacgatgtgctgagtgaactcctgaggttcagcaaacctgcgcaaaggttccagggacccatcttctgaggggcttctcctgcaggtggtccaggcagccatcaaagacggggctgcaggggggtctggggcccaggatgacatttgttattcagtaagtgaagagagaaggctacaaaaattgagtataatcccttttgtattaaaacaacagcaaaacaatgtaagtatggatagaaaaaaagtctaaaaataagtatagctaatatccagtggaaggagaaggtcagatttaaggacaatttttttttttttaccttttcctgtgtgccgttctttatttccaaatctaggaccaagaataataaatgtgaacaaaagaagcattctgatgatgaactgtgggcagccacagaaatgcttaaggcacgatattgaaggtgagcacccttcaatatccctgtccctgaagcagggacaaggaggtcacggctgggcaaggctgggaggaggagttcacagggcccactctggctgaggacatggcggcagaggcagcagcaggtgcctgtgcaccgtggctttggttgggtgtcacataccaggtgtgccaggctctgccgctgccgccatgcctgcacaatcagacgtggagcccgtcggactatttataccccttggaacatcagcaggccagccaggaggcgaagaccttcgcaacatgtccaaggcccgcagctgctacccctcctcacccagggcttccgtgaggacctgctcagtgttatcagtgcacccactccacagataagaagctgtgcctggccccactaatggtattattttagggaccactcaaaggacaggccaggattggggcctgggtcatctgtcattccttccttcatcgacacgctaaataagggtcaaacagagaccagcacttgtttgcagggctggaggggctctgccaagctggagtatcatcctccccagagactgctgggaaaggcatttgctcagagcagctatttctgtcccactcacagcacctctgggtgacccacccacaggtcagagtgaccttgcaaggtggaaggacaaagacattgctgcctaactcttggtgagagggaatgtgtaagatggcttatgctaaaacctcccaaaatagagataccacagatctggattctgttacaaagggtcagagctcaaatatgtaatttctctgctggctttagcattcgaaaccgtttttactcagcatttcttttttctttctttctttttttttctttcgagacagagtttcgctcttgttgcccaggctggagtgcaacggtgcaatcttggctcaccgcaacccttctgcctcccgggttcaagtgattctgctgcccctgcctcctgagtagctggcattacaggcatgtgccaccatgcccggctaattttgtagttttagtagagatgggggttctccatgttggtcaggctggtctccagctcccaacctcaggtgatcagcccacctcggcctcccaaagtgctgggattataggcatgagccaccacacctggcccagcatttctataatttaattgtgttagatatgcaccaccgagggtcaagtacaaggatgtggaccttggagcaaattgtggccaaagtcaccacccaccatcagtctccaccttcgcccccacagataccccctgccaacacacacacatgcacgcacacacacacacacatatataaacttttcttgggaattatttagtctgttactcagtgacttgcctgtggcattaaacaatgatgtgagtttgagcaaacatgcatccaaggtcagattcatcacacgtaatgtccttcctaaagccacttccttttccagaacgaaaaaaagagcagaggaaacagctacagggtttgggatgagggtcagcaggtaaggtcactgctctgtgggggcacgtgctcctgggcacacctgagaacgcttttcactgatgacccgaagatgcggcccagcactaccaaaggggccaatcagatgaagcccacccacaggcccccgactgtaaccttgacctgaaagtgggaggcccagaagaccagggttaaggccctccccagggtcactcaactgtgaggggcagagcccacgtgtcctgatttccagcctgttggtaacaacaatgacatttattcatcaaaacatgtcaaataagctctgctgtgtgccaaacactgtgctgggaactggggacacacagtgaccaaaatagacaaagttgctgctctctagtcttctgtaaggcattccatcgttgggtgacaatcagtattaaggagagaaagcaagtgacaggggaaaagagatggtcaggaggagactcaggggtcaacaggggtcagaagactctgagaaaggtgactttggacaaagacctcaagaagcctagggaatagccctgcagctgtctgcagaaacagcattcctggtcccagaatcaacccgcattcaccaacctggaagctctctgaaccccttctttcagggaggggtatgcatgactgattaaatctttcgccattggtgattagatcaaccttcagcctctctcccctccccagggtcaggaggtggggctgaaagttctaaccctctaatcagcatttcttttttctttctttctttcttttttttttttttcgagacagagtttcgctctggagggttgattccattggccattcaagggttacctaattagcataaactcaggtatggtcaggagaggattggtctgaatgacaatcgatgctcccatcagcccgctgaggggattccaagggttttggaaactctgtggcaggaccaaatatttatttttgattctatcacaccttgcacaaaagactttgcaggtgcgatggagttcaggatcttgagatgagcagactatcctgaaatatgtgggtgagccccatgtcatcacagggtttccgtgagacggtcagagagagagatgacaagactgttgggagcagaggtctgaatgagagcgagtggggaatgcttcagtgctggctgtgaagatggagggagcgactgtgagctaaagagtgggggtgcccaaaaggctggacaaggcaaggttcctcggagcttcccgaataagccagctcttccgagacgtctgaccttaaaagaataaatatgtgtcattctaaggcactaagtctgcagtcatgtattacagcagtcataggaaatgaagaccggggtggagggggcagacctaatgccagcaggagcgggggtgtgtcctgcatggcctttctggtgattttacccgagtgaggggggagcccttggagggctttaagcagaggaccctaaatgtcatcagatcacgatggcagcttcaataagccagctctgtgataaatgctctgctgacatcaacttaatgaatgaccccagcaacctagaaggttatcatgactgtgcccattttacagaagaggaaactaaggcttcaaggagctacgtgatgtgcccgtggtcacgcagctcagaaaagctccaaattgttcctttaaaaagacacacaaggtcctttgtccggtggccgtatttgttacaggagtttcccttcaataaattcgcagctctccatgccccttcctagcctcccgcaggtccctgcggctctcataaggaggcagacgctggcagaccataggctcatgatggccagcccagcaggctggatgtcactggggtctccaggaggcaggacagggctcaaccccagctccttcacttgtccacctgaagatccttgagtaagtggaccccaaccctcgaaacccccggcttcgccccaggcctcaggctccagcctcattgtctgactccagcttttctgatgcagtggttctcaactgcgggtaactgtgtcccccaggggacacgtggcaatgtctgggggatgttactggtatctggcaggtagaagccagggctgctgctgaacactttacaatgcacaggatggccccacacaaacagtgctccaaaccctaacgtcactagtggcaaggctgacttctcctctccagcttcactgcctttccccaggaagggtctcctctggctcttagcctcagtgtctccctcatccctttaggcttgggggcattttacatggattccatgcactccgccttacacaactttgtacacgtcccagccccttcccttccaccttccgccttcagttggtcctaatttgagccaattttgtttcctacagggattctttgttaatccttttgttttgttttgtttttgtttttttgagacagggtcttaccttgttgcccaggctggagtgcagtggcataatcacatttcactgcagccttgaggaccaatgatccttacctctcagcctcccaagtggaggggattacagatacatgccaccacactcggctaacctttgtattttttgtagaatggggtttcactatgttgcccaggctactttgtttttgttttggttttggttttggtttttgagagagtttcgctcttgttgtccaggctggagtgcaatggcgcaatcttggctcattgattgcaacctccgcctcccggattcaagagattctcgtgcctcatcctcccgagtagctgggattacaggcatgcaccacaatacccagctaatttttatatttttagcagagacggggtttcaccatgttggccaggctggtctcaaactcctgacctcaggtgatctgcccgcctcagcctcccaaagtgctgggattactggcgtaagccaccttgcccagcctactttgttaatcttctacctgacacctgccattgcctgagggtttccttgatgatgcactcaggagcctgtccaggcagggggacatgtcaccccagagcccggagcctccttcctcctgaccccagagcctgggcttcctccccactgactccagagcccgggcacccctccctcctgaccccagcatatccctctgcccagaacactgcctgcagctcgcaggtgctcaagacggacttgttgaatgatgaacgtggcagacgccgaattggactctgagtccttgctctgtcctttgggcacaggaccagctagagaatctgcgcggcccagggcaaaatgaaaatgcggggcccttgttcaaaaggtatgaataaattcacgacagcaagaacaaaagcatgaaaccaaactccaggccctcctgcgcacagaacctgagggactcttggccggccagtagttcgtacctgtcttccaactcaggctgccggtgtgggttggtgatctgtggacaccctcagtcctcacaccagtctccaagccactcagagctaggcaagctctgagccttgcattctgcagaatcccgggcctaagatccggccccatctcgtccaccatgagaaccgtgtctgagagggacggggagaagcaccgagactcagtcaagggaccgtggctcttccagcccaggcgcatgctgcctccatccagatggctgcagccactccaaagctttggagagttctgtgtttttcctcttctatttttatttcctcaaatccgagaccaagagagatcagtgccagagtcctggaggggtctgagccaggaggaattgatccacaggcaagaagaaaaacatgtccgaaggaggtcactgtgagtgtccttgtcagggatagacgggcaccaaccccagtgtgggctgggccctgacaagggctgggtcctgtgagggagggttggtcctgccatcagatgccccagactagggctggccagggccccctctgcactgccccaccctggaggagttgtttccactgacgcttgtgtgaacaactccccctggggttgtgaggacccagcccagcaaacgtttaaaggtcccatttggtctataggggcgcaaaggcagtctgtggcgcagctctcaggtttgtgagcgttcagtgagtgagatcaagtgtgaagcacttgttatgccttgagaagggtccttggctcagagggagggctcagaagcttttactgtcttttgcaaagattcagaccagtcatcccatcctccttcccaggcacatgtaggataactggggtgacaagtgactctataaagaattgagggcctacagataataacgccaagcacataaaactcaggtctcaaattgttgaaatcatcggatggggtggggggattcttagtgggaggcccctggattccactgcagtccctgttgttttattttgcacctcctctgtaccagatactttattcttagcgcaacctgccgtgtgtggtgtagcttaggtactgtgggaagcagaattctaagagggcctcaaagatttctgccctccatataatctccaccccttgaatgaatatggtggctattgctccccaaaatgaagggattctgcccatgtaattaaggtccctaatcaattgacttggagttaagcaataggagatgatcctgggtgggtctgacctcatcaggtgagcccttacaagaagtaagagatattgtcccactagcttttgaaggactcatcaggtgagcccttgcaagaagtaagagatattctcccactggctttgaaggattcgctgccaagttgcaagagggccacatggaaaggaactgagagaagcctcaggagctggaagtgacttggctgacagccagcatgaagatgggggcctcagtcctacaattccgagagactgagtttggccaaaacctgaatgagcttggacaaagaccctgagctgcagataagaacacagagctgacatcttgcatttagcttttgtgggatcctaagcagagaacccagcgaggccatacttgcactcctgacccatggaaattttgagaataaatgggtgatgttttaaaccacttaagtccatcataactgttacaatcataggaaactaatacagataggtaattgccaattaccagagtctttaaaattctgctggtaataggacttggacttctgatttttggctgtgcctagtgtcacccagaataaaaacctatagttcccagtctcccttgtagctaagtgtgactgcatttgtgctaaatgagaggtaagtggaccttttgcgtctgatctctgggttggctgcttaaagaaagcacacgaacctagaacacagatgatatggtctggctgtgtccccacccaaatctcatcttcaattgtaactcccacaattcccacgtgtcgtgggaggaactcggtgggaggtgattgaattacgggagtgggtctttcctgcactgttcttgtgatagtgaatgagtctcatgagatccaatggttttaaaaacgggagtttccctgcacaagctctctctgctgccattcatgtaagatgtgacttgctcctccttgcctcctgccatgattttgaggccttcccagccatgtggagctgaaagtcccttaaatctctttcttttgtaaatttcccaggctcgggtatgtctttatcagcagcatgagagcagactaatacaacagatctgactggtgctccagcagccatcttggaccatgaggtaggttgtgaggatgaagccatgaattaagatggcagagcagaaaattagaagcctagatccttaggggcagagtaagacaactaccaccctgtctttggatggctgaccttcagactttcagatgagagaaaaacttttatcttctttaagccactattatttggggtttttctgttatatgcagctgctcttaagtatcctaagtataggtaggcaccatacccatgtcacagatgaaggaactgaggcacagagaaggtgataagttgcccagatggaggtctcacagctgactaagtaactgggttgggctctgagctggagccaatcccggcccctctgcccagcacgtgctgcctcttgcctggtggcatgagaattctcctttgtcccagataaataagaaggcagcagatgtcttccccaggggaagtgagtgtttgtcctctcagccacctccacatgcaaccttgactgggtgccacttcccgctctaaacaccagacagagtgggcttgtgcgcccatcccacggccagtctctgcagagcaacctcccaggacgaggaggaggaaggggcagcagcttgattggtgcaaggtgggactggaaccctgcttcctccaggtacccttaaccctccccaccgtggcttcccctggtatctgcatttccaatggcccccagtgcactttggatgaagcccagggtccctctgtggtcctcaatgccatgcacaaccagcctgctccttctctgctaacgtcctgcctgcctccctgtgccgcagccacgtggccttctcgctgttcctcccgcctgccaccccagggcctttgcacacactcctccctcaggtggaagacctcttccctgcagtacctccatccctgtcagcccacgttgcctgcattcaggtctcagctgaaagggccttcctcagggtctgtccctgaccaccctgtcctccctgtccccctacatgctgtggcttcccgacacacgtcattccttggcattaaatggctcgatcaggtctggcttctccactaaacacggtaggcacagtgactaggcccatgggactttcggggccacaaacatattttaatgtctttcaaagtcagaacaaatgaatgtaactattcctggatgatattcaccttgatgccaacacagtcaaaaacaacaatttgtcttatttctggatggaggagggaccacagccatgctggcatggggctgggtcctgtttgtttgctgtatcccctgatcaggacccactcccgtgagcgcagacttctgttctgttacctgtacccactgcccgccatggtgcctggtgtacggtggacacacgatgaattagtgagtgagcagatgaagaatgaacacttccggccaaagaggaagctcgtgctgtccccagagcccaccctgctcctagaaagggcatcgcatcgcactttggctgccccaagccaccgtggtcatccttatttatggccacctgctcctggatgggggactctggcctggagcccccgtccagctgccagcccccttgcagagagtgcccccagcagtgcacatgagaagggttggagctggtgggaagctgaggttgagttccagccgtaggagctccagagttcactctgcccagcatgggcggcagcagtggcaccaaccaggaacagtgaggaccaactgaggctggacggagaagctctgtggggcctgagaaccctgtggtgggaaagggagagggtcttgtggtggattgaatggtggcctcaaaaaagatatgcccacatctgaatccctgcaacctgtgaatgtgcccttacttggagagagggtcttcacagatattaagtatctagatcttcacagatattatgaagtatctagaggaggaggtcatcctgtgttatctgggtggaccctaaatccaatgacaggtgtccttatcaaagccacacagagggccgggtgcggtggcccatgcctgtaatcccagcactttgggaggccgaggcgagtgggtcacaaggtcaggagattgagaccatcctggctaacacagtgaaaccccgtttctactaaaaatacaaaaaattagccgggcgtcatggcgggagcctgtagtccccagctactcgggaggctgaggcaggagaatggcgtgaacccaggaggcggagctggcagtgagccgagatcgcaccactgcactccagcctgggcaacagagcgagactccgtctcaaaaaaaaaaaggcacacagtggagcgatggagaaggccatgggtagacagaggcagagattgggatgatgcagccacgggcccaggaacacctggagccactagaggctggaagaggctgggaagggtcctccccgagagcctccagaggaagcacagccctgctgacacctggattttggacgtctgccctccagagccacaggaatgaatctgtgctgttttaagccagcagtttgtagtgatttcttatggcagccccaggaaactcacatgctcactgtctccaaaagatctgaacagagggcaggactcaaaacatgcctgtgagaatccactctgtagatggccccggtgaccactgctaaccctcccagccccccagcacggtccacacactattgtcaccaggcgatggaggagaagacagagggaaaggactacccgtgtgcagcgtccacggtacagcaggctggccatcggccccacccaccagagaagctaacactcagcgttggtgcgcacagaggaaggccctcaggcagtctggaagcaggagggagaccgagccctgagcaatggtccaggaactcagtcgtcagggcccaacacacaggatggcggacggacactggcaggctcggagctgcaggccaggaatccccatgtttctccagcagccctgggagattccagctcaggaaagcctggggttgagcccaggttttgaggtttaaatttcagttccagtaactattagctggggactttgagtaaattccttcacctctctgtgcctgacagtgagcgggactgagaagagaggcaacgagaaaacgctccagggggaaaatgagcaagagaggtggtaaaccaggaggggggaagatgaagaggaaaggtgaggccatttgtggtgctatagccacagacgcacgtgcctgtagggcctgcccagagggccaaaagggaaagtgggacagcggtaacgaaagaatgtttgtcctttccaaagtgcccggctctcccaggctagcctctactatcctgctcttaatagggacattagggacatggatgcacataaatacgcatctacaattttaaaaacagcaactgacattcacccttttgtaagagaggcaatagggagcagtggagactgggcaccagctgtccctctgcagccacccagagcagccatgtgtgtgtggggcccagagtggccaggcctgccgattctcaagagaagccagatttggggagtttttcttcaccctcatcttctgatattcaaaaacatgttggcaacgaatccacattttaagacatggataaacaccaccatgccaggggaataagacccgtgtgcaggccacatctagacctccagtgtgtggctctggccttcagcctggaaaatggaacaaacgctaaactgcttgtccggacaatggcgggagggtctggaaatcacaaggactgggacttgttaggagcagccgctttattccaggcaataggggaagaatgggcggcctgtccaagtatcaggctgggattccaacaacagccatcaggtgacctgagtgtgcacttcaaagaggaaaggcgtccaaactgctgctccacgctacgcagccaagtgctgctccatgctcggcgagacactgggccctggccgccttcgccaggcctgctgggggccatccacgtccacagtcgcgctccagcaactgccccaatcatttgcactggacagtgtcagctctggggccggcaccgctttaaagttttgggcgtgcacctcctgccctttttctctctgtggtgcctctattttattgggatgactaaatctttcaactatgttagcagtaaacacagctaatttaccccctgcctctttgaaacagctgctgacagctgcactgtaattcaatcaaggacctttgtagtcgagcctaccaaattcacatgtgttgcttggttccatctctcctgcccggagccccacacagctgcaccaaatattgacgagcggccacttccccgcaaggcctggatgctaaacagagcgttcacggtggagacgaaggcagggagctcttagcagtgtgagagaacttcagtgtccaagaactgagagaaaaacacaacacacacagacagacacaggccaaagagccagaaccaaacgtctccttttattgcaaggtcaaacccttttcattttgtctatttatacagaattttcactaaggactgctcgacgcaacagctgtgagtacattggtccaaccattaataaatagtcttaaataagaaaacaaacaggttgaaggaaagcaagctcatcgtcctgaacgagggattaaaggggggggggtgttcaaaagagctttggatggaaataaataatctctttgctttgtaacaactatttacaggtttaaatgtacaaatgatgctaaccagaggctggttgggtcagaaaactcacaccaagagggatcacacaaaaagccccagctctgccagcaaatgaaaccaaacataacaaaaaatactcctccccagtgactagagagtggaggctgcagcccaagctactaaagaagaaaaacatcaaagaaaataaaaacagagccccggtgtttccaggaactgtctgagtcaagatggagaaacagtcccccacaagaccgggttccacatggccacagttttcgatcaccttgttttctttacagatgcagaaaacgtttgcagacagtctagccctcccctaggccttgtgtttgtggccggaggctgagtgcatactatttatgggactcaccagccaaggcaaggcaggcttacaccaagagccacgtcagaaatgccacctccaaatcgggacacttggttaggatgtcaccctcaacaaggcttctatttgcaatgtaagtccagcacatcctgcacccatcagacctcctattatgccatctcccccttaattcaaggagcaaatttgtttgcagagacttctgatcagggtctgcaaatgaagagacagccacgggtgcccttgccagggcccagccttggaatgccactgcagacaaagaccagagggtccactggggcgatgtgcagtgctcctgctcaccccactcccgtggagaactaggcttcattggtgctgttttttttttcttttgagatggagtcttgttttgtcacccaagctggagtgcagtgggacgatcttggctcactgcaacctccacctctggggttcaagcaattctcctgcctcagcctccagagtagctgggattacaggtgcgtgccaccatgcccggctaatttttgtatttttagtagagatggggtttcaccatgttggccaggctggtctcgaactcctgacctcaaatgatccgcccacctcagcctcccaaagtgctgggattacaggtgggagctactgtgcccggcccattggtgcttcttaacaacagggttgagttgcaagttccatcctacttgctgtccttgtcccctctgcaatttcacatggatttactaccactggggcgaggtgaaaagccaatcccaaatgtctgcgggtatttcacacacctagtttcatttctgccacggcaaatccagctgaacaacagaacatatttttcctccaaagatcaacacaccgccctcctcggagcagacatttgctctttcccctcccactagatcttggatttgggcaaacctcggtaaacactgggcctctgcaagcctcaggatgaaaactgtagggaatggagagggacctccccgccctccacttgacacagcttctgtttacgcatcaggataaaccgagaaatggggataaattgtttaggaaaatatatctgtaacgtcctaaccattttcattcattcgttttattgtgacatttattacaggaacttccgggtcaattttcctttcgcacagacaccaatgtgcccaccccttgccacgcccccttcctcccacggctgggtggcctggctggtaggcgctcataattacctctggaaacgagtccgtgcatggctgagacttcccagccaatgacctggcccggccatttttctttatgcgttgtttttttttcctgctaggttttgcctgcacagcttgtaggatcttgttcattggatgctgccactgaaaaactgatcaaaagccatatgctgctcatgtttcctaatactctcacacctttaaagttggggatagggaggggaaggtctcacaaaaggcagttggtctgctggttcctggccaaggcgagcaatggaggatccagaaaaacttggccccaaagggtctgaattctcggaggagctagtggcagccacaggcccggaccaccatgtttctgtatttcttcaggatgacgttggagctgtcatcgaagtagaggacggagatggcattgagctgcgtgggcgcacagcagggcttgggcaccgtttccgggttgatgaagtggacctgaaacacacaccaaaacatgggcagtggtgagaagcggtgagtcgttctaactggcctccacgtttctataaagaaacatcctgtctgggcataatgaatgactgcaggtgacactccccaagccaagcactccctgttctaagcactttacatggacaactcagttctgggattatccctgttttgcagacaagggaaccaaagcatagaggttttcacattatacagtggggaaggaaggggccagatccgacattcaggaccaggtaattctctgttggggaactgccctgtgcactgtagattgctgaatagtgtccctgacttggacccactagaagtgctccatcttgctcatggacttctctgcaccttacagaggatgtgggacagggacacatagactcaaatgcctatgagtgccacgtgagtgccactgataagcaaaatagaccgaggtaagacaatagggaatagtggggactaaggcaaactaagggaagaggccgccactcaacctaagctgacggcagccaaccaagatcagtgttagcagatctgccacgtgttcaagacaggccagagattccactgtcctgttgttttcaacgtgaaacttctgggtttccagcaactgtaggtgccaggcaagagcatcagtgactggcactctgttcacagcctccaggctgtgactgctgacataggccagcatgctttttacacattttatgatggacaatttcaaactcttacacatccatacccttccccacctgctccaccttgaatgattttaaagcaaattccagccatcagctcatttcctctggaagcatttcatcaggactctctagaagacagttgcccccttttaaacatgaccacaatcgcatcatttcacaatccctggagaattcactttgatcctgcagatctctggtgaaatactgatggaagtaggtgcacacagggcgatggcactcctgttccatgggccatgaaggcaggggttggagaaggatagagatgtgtcccctggcagccggggagacatgcctggcaccttccaggggatactggcacagcacagcacatccaggccagggaacaggttggggaggactcttctgtttccagcctaaggaccttcaatcccaagtagggctttgaagtttacaattgaggaggggagcaagggctttggaaaaccaacacttaaaaaaacaaacaaagaaacaaaaacccctgccctcaaagagcagaatcaaatgaaagggatagatgagatttttctccaggacttaacacacaggacagggacaagaaaagaaggaggcagattactaaatgaaaggagggagtagtcctggtagtgagctctctgtcactagaagcattcaaggcagggtggatgatcagtaggcaggaaaggctcagatgatgttcatgacagggagctacataaccaaggtccttgaaccttggattctaagcaaaagaacaaaatccctacagctcttatcactatggttgctgttggcagagcaggaataacacctactgagtgtcgccacgtgctgggcacgttaatctcattatcacatggaatcttcctggtgaccccactgaaatttaacttgaaatggccccatgggtccccactcatctctccatcccattatcctgctggccagcttctgatcactgtgcccctcactgaaatttctcatctgtttacctgtttcctctactggaaaatgaagcagggcccagtgctcttaggcaccgtaaccagcacccacaatactacaagcatcctcaaaggagcccatacaacttttagttactttaaaaattaggagaaataaatgaactccagggtcgaagattatactcctctttataccaaaccagtcataaagtacaatttttgatttttttttaacggcgcaaggggcccccaaaagtcatgacatggcaatgggctgacatctactcaggccccagcttggaggcagcaggatctggtggccccgcagcctgcccggcccaggtgaccacaccccaagatggcgtgacacccaccagcgtctgcacgatggcgtggttggtggcgttcatgtaggagttcagagggaaggcacactccccctcacagtagtaggcggcgtagccttcaggcgcgatgatccagtcctgaggaggagaagagagtgtgggaaaccatgcagaaggcctgagccacagcatcccaacccccatgctggccagaaaccaccacgccaggctcacgacccaaggtggaagcctcagaccatgccttctgagcagcagggggcccagcaggggcaggaaacatgggtggcctctcatggtcccaaaagaatggaaagaaggaccactctatagtcttggcctatagtccaagcttagtagactgagtgggaagacggctcaaagctgcggtgagctatgatcacaccactgcaccccagcctgggtgacagagcaagaccccatttctaaaaaaacataaaataaaaatgaaggaaagccccacggggcttggctgatcctaaaatggacatccatggctgtgtcttctggacagaacgcggcacaggaaggagcctccggtgtgaggcaatcatcagctctacccccactaggtggtcacacactggcagttcaccttaaacaaacctccatgcctcggtttgcccacctgccagagaggctaataactcataatggcatcacccatgctggctccgggtgcactggtcagtaagggatccatgtgccatccttgcctctagggtctgggtggcacagaaatgttgcccaataatcaatatactcctcagtgatgcttaagcacatggaatcttccagcagaggcccctggagtttgggttctgtcccagctgcaggtggatgtggtcatcagtcctgagggcaggctcacaggagggctcagagctggctgtgtgcacgtacgccctgagtgtgtctgggcataatccccagggaagattctggactctcccactgaactacaagctccctgagggtagaataccaccagttgccctgatgacctcatgacaataccctctccagggatatttgagccccacagggcagacacattgcagtgttcatcgctgcatctccaatccagtacctagaacagggcccagaacgctgcagatgctgcatgactgctgaatgagaatcacaccagagctcacggcaggtggatcacatgaccctcactcctctcctaggattcatcccctgccttttgcctcactccatgcaaatggctccagagggggcagccatgtgccagtaacatgaccccacccctgaaacagttgactggttcaggaacaagtgcctgaaccaagctgggcagatccgtccctcccgtgggaatgggaatggggtaaatgaagtcagagggcagagggggagatggctccccaggtatctacattcaaacacacggcccggcatcatcttgagaagcagccagccaagggatgggaatgaggtgcatgcagagaatggggttcagagtccaaagtgtttgggttcctggttcaagttcaagtctcaaccacatttctgctctcggatttcatgaggcctccctgtatccttagcccaagtccccttccctagcgaggccacttgatactggagtcttaactggcagagatgagaaacaagactgagcacagacccgctgcctcgtgggagcccacgccagagggcccacacccaagacagacccagccagccccttacctgccagcccaggtctcggaagctgacatacagctcgtgcttcttacaggcctgcctctggtcgctgctgctgttctctgcattgacaaggaagtgaagaagcagagcccagtgaggagaaagaaacacacacacatcaaagttccctccatcttaggcagtgatgtgaacagcaatgaagcacagacggctggggggtaaatttcccgattcaaaagccagttcgagggtctaactgccttaaaactcatttctacccccagcaaaggccctactaagggaggtgccaatgccccattcctctctcatgtagtcttatcccataatactttctggaaccttctgcggacactggtttcttttatacacgtgtgttgtttaaatgctgacatctgcctggattccataagggaatcaaaccccatccacctcacacaaggccactgcaggcaccctgctcaaagagatctgcttatgaacaacctcaactcgtgaggccccaacacactcatccctctgcaggggcaagaggatgcgggacagggcctgggacaagcaaccatcaccaccaccagcaagaagaaatgagacagcagagagtcaaaacctgatgacctttcagaagaaaacactcccgaggtttctttgagtagtgaaaatgatacagggggttttccagaactacgtaaatttggaagcattcgggtcagggcctgagcacttgtaaacattgcagaagtgtctgtctgtctgtcttgtctctctctcacacacactgcaaccttccttccaccccacaacagagggattgcttttttcctagtcatgacctgtctttcctccacctacaacttcccaggggctctctgtcatactcagagcagggcccaggctgtgcctgtggcccacaggcccggtgtgctctgacaactgattgaccaaacaccaagctcactcccaccgcagggctcttgcatgtgccgtttcctccacctgcaatgcccctccctgcaatctttgttgtgtctggctcaagccttggttccaatgtcaccttctcaaagaggctttgtaaagtcactattagatccccaaagctaagctcatcagtgcacatcctgtccaggagtcaggaagtggttcaggaagggcaagtgacccaacacaaactaaaagacatagagacttctggaaaaagttcccacattcctaagaaagacccatggagagacattcattctcttcctcctactgcccaggagcaaaaaataatgaagcccccctggccaactacagctgtggccttgagaggaagcagcactgaagatggtggggtggggcagaaggagctggggctcagaggacactgttgagctcctggatcaaccaaccctaatgtccacccaaccttagctctgcgggctggtgaattttctactggttgaagcgcatttgacttgggtttctgatgtctacagccaaacctcaacccatcccaactggctgccctgtgaaggctcatcccatatagaaaacggcagtctgcttgagcccaggtgtcgcccttagaggtgtagaccctggagcacagtcagcctctgagtggagtctaactcgtgagtcaagaccaggtcttggggactgctctagctctggagtcaaaccccagctctcctagatcttggactcctggtttgcaaaatgaagagagctcctataactcctggggtaggcttgagtgttcatggcagtttcatattttcttcttcttcttctagcccacttgttagggaaatttgaaactacgcacattctccattcacacacacacacacacacacacacacacacacacacacacctgttaactgtttgaatgcatggctctttcctccacacccactacatgccattagggtatatgtcaaagagtggaacaccactcaatttttggcttttctctgattcatgagaattctatctgcatagcttctaggataatgagaaatggtaagataagaaggacatcgccgaactcccttccctaagccttactttcttcatctgtaaaatgggtgggacaggagtggtgcagtaagctagcctcccatggaccacacactgcaaattaggacacctcctcagacacagactggacattctgttggtcctggaaaccttcagtgtgccttagctaccccatggctgagaacaattgtggaatgaaatgggctagaagcagcaagccaagagtggaaagcagaaaggagaaagaagagggttgaggaggaaggaggcaggagagaggagaacagcatggagagcacaggagtcaggaactggcctccaaggctcaggctgagacaggagcaccatgctccctgctggggactgaaaagcaggctgcttttattttcatcagcaattttttttttgagacagagtcttgctctgttgcccaggctggagtacagtggtgcaatcttggctcactgcaacctctgcctcctgggttcaagcaattctcctgcctcagcctcctgagtagctgagactataggcactcatcaccatgcccagctaatttttgtatttttagtagagacggggtttcaccatgttggccaggctggtcacaaactcctgacctcaggtaatccacccgccttggcctcccaaaatgccatttttgaatatatctatttatacagatataaaatttatctacagttcagaaaagcaatgtggaaagatatgcacaccaataacgaaattacatttaattgattataaccgaatcacatgtgtgattcctgaggagacacttgagactttcggtgaagtgaacttgctgaaggctggggcggggctggtgggctccaggctttggggcaggagcgcttgcccctgggtgccctgccctcgcggcctgcatgccttgtggagtcactcattcattcagccattgctaggggctgcttcctggtgtgcaggcatgagatgagtcccaggtgtaagacagcaaagccctgccactcaggggcttttccagaacgagaggcgggtcatagataagtgagtgcacatgacttacatggagatgagggctacagaggaaaacaaggcaggagaagctggagtgagcgggcatgctgccgcgggtgccagcaggcgctcttctgaggaggtgacatgtgggtaagaaccaaaaggaagtgagataggagggtggggaggcatccaagggcgaggcattcctgcatgacgatgctgagcagtggggacgaggcgccctccatgtctgaggccgctggagtagcatcggatagaggatcagaggcaggcactgagcctggcaaggaatgaggaagctggggcctgggtcagcagacagtgtgggcggagggaagatctgcgtggctggaaccagccccaaggctcaatgctgcaagggggtgctcagagtggatggaggcagccagggggagcccagaggcccctggtccccaccctccgtgggggagtagcagggctgggagagagagaaccagctctggggcagcaggaacctccccagggccagggtgtcctcaacacaggaaggtcaaggtcaaggaaccatctgggaggagcccaaacagctggactctacagcctgccctctagagcacacgatgccaagcagaaacctaagatggccttcatggctgtggcaatgcccagggccacaggtagccatgcccctccacgagcctcctccctcttccctgtgggggggtagaaggcagggtggaggagaaggaacatcccctcagctcagggatgtgtcaggtgaagctgctagctcgagccagggacattgctgactccttggtgtcctgagtcaaggaggattctgaagctgtgttcaggctccgtcagaaggaagtcccatgatctattagcaatgtctgtcatgagcacaggagaggccatgatctattagcaatgtctgtcatgagcacagaagggacaaggagtggcctgagtgctactttccccaaccctgtcttaaagtaaagccacgacatttggcataacttagttcaaacccaaggccaaacagaccaaggccgagcacagctcatgaagctagttatggtgtacgagtgaggcgtgggcactggccctgccaccagggactccagaccctgctctgtgcttccagggctctttgatcacggctgtcccagcagaaagtggccggagctcctgtgtatccttaggacttattagcaggaaaacaaggaaaggaaacgaaggagggactcccagctcccctgtccgtccaagcctgccccacccgcccccaagcaacagaaagtgagcaggagacagccctgacgccagcaccgggattcatccacctcctcaaccccctgcttgggccgcagacaagtcaggactggtgcttaggctcagctcccgcctccacgggtcatctggcaaaggcggctgcttaccagggagctgggtccaaacgtgggtggggagaaggaagtgcagggacccagtttctcaaccccaaaccgcaccatctgaagagcacgtgaagccccgggggagggggctggcgggcaggaaagcgagctccgcgtggggtagcgtgccggagcatgtgcccccgccccagcacacacagggctgccgagagattcaacttgtgtggctccacggcagggctccagcccaaaaccggggggacgagcgattcaaaggggcaggcacacaggcgtacacactcacactcaaggactctggcctaagcctagggtggggcccaggcctcggtatttttattttatttttttcttaacttccaggcaggttttagaagagctgcaaacagggccacgagccatccgcgggaaggaggcaggttcccagcaatgaatttctgccacgggaaacagtgagagccccgtcctgggggctgtgtaaatggagacttggtggggctttgatgaggaggcggtggggaaaatcagagtgaattctaagcccgcgatgcctagttcctctccccctcattacccaggtgcacccgatggagctccaagacacggaagtctctgccgggatgcagtttgcctacacttcctgcctggatgatctgccacatcctctaaggagtctccggcctctgagcaccccctcggcacccaccctgttcctcacctttcttagagcagccagaatgatcttatcacctgcaccccacaccacagcttgaatctctgcaaagacttctgaacatgcttggcatgaagttcaaactcaagacgtgactcccaagagaatgcctgacccgcccaccctcactcccctcccctgcttcagcccccacagcctcctccccactccccaaaggcgccaggaaaccccacagcacaggcctctgcccctgcaggtcccacagcccagagcatcctctccggaccagcctggcctcgtgggcacccactggacccagagctctcagctcgctcgccacgaaatgttgtctgcagccctcgggatgggctgcgttccctaggcaccaccctgactctgggtctgttactatgtatggatgtgaatggcaaccccctccttcctgtcctaaattaacacccccaagggcagcctttgtgtgggtgttcgacattgaatcctagccttcaagagtccagcataaaagaggcttcgaatacaaatgaaggaatttggttggtttttgacttgggagatcaaagacccctttgagaaacctggaaaaatggatccactgtcagaaaagaaaatatacggaatccctacacactctgggccacacagacccactgaggtccatccgggggccccaggacacccgccaggggtcaggaagccttgtcttaaaaaggccaccaaccccactgacctgccttctcccttgaaaagtaaaatgaacataaatttcaagctaggctaggtaaggaggaagaagctattggcactagagggttaatttgggggtggggctgctgctatcccctcgccaggacctttctcaatagccccttgctccccttgggtgcttcctgggaccaaccgcaggccccggaggtgataagcagctaatagcttcccacatggtggcagggcaggtttgcacctcagacctttttctgccttgtgatcaacctggagccaagaaggctgcaactcctgagccggcccccagatggttgtgtcccagctccttagcaggatgagggaagcactctgaggaggctgggggcagtagctcatgcctgtaatctcagtactttgggaggccaaagtggaaggatagcttgagcccaagagctcgacaccagcctaggcaatatagggaggccctgtctctacaaaaaatagccaggtgtggtggcatccatctatagtcccagctacctgggaggctcaggcaggaggattgcttgagcccaggaggtcaaggctacagtaagccatgctcacaccactgcacgccagcctgggcaatggcgtgagaccctgtctctaaaaaaaaaaaaaaagaaaagaaaaaagaaaaagaaaatcactttgccaacaaagatgtattctttcctatcgctgctttaacaaattaaccaagcaaattatcaaaacaatacaagcggattatagctctgtggctctgaagtccaacaccagtcttagcaggtaaatgcaactgggggctctaggggaggatcccttccttgccttgtgcagcttctccaggccacccacatcccagggctggtggccccactcatctccacccctctgtgctctgtgcttacatggctccaaccacagctcaaaaaggctctctcctataaggaccgatgggaccaccctgctacacagagcccgcgtattggaaggccagctgattagcacctgtgattccaagggcagtcgtaactcccctttgccctggagggtgacacattcacgggttccagagattaagacactggcatcttggagaggctattgccctgctcattgcaaatggcttcctgaagagccagagaaacggcacccccgggcagcagctcccctggccggcgggatgggattggggatggggagcaaactgggctccttggatctgggaggtgtcacccctccagtccactggaaaatggtttgttgtgaggttcattattcgaagctttggttttagtctgggaggagtcccgatgcatcttctggcggacttgacactgcatgtgcagggggcatgagccaggcaaggggtgtgggagggctgtccacagatgcccacagtgccagcaggtctgctccaggccagcccacctccaaagctcaaaaccagaatgcaccttctggggatcccagcacccccaggccaccagaggctgtcaatgtcggtttcccaatcagcctatggggaaagggattgcaccccagccacagccccagtgcccgggacaaagccaggctcctgtgggggctccacgaatgcctggtgaattgtcagaaagcacccaatgggattgctggggacaccgaagctcatccaggccaggtagatggccccggcaatgcccaacagggaagagggcctggggcaagggacaacccagaccccagggacccaatcccagggctgccagttacctacactgtgcccttagacaaacgacttaccctctttgagcctcagttttcccctctgtgaagtgggaggccatctacctcagagcctcaagaaccacacaacatgatgggctaaaagctgtctgctttagaggacctgcagagcacgacctcctggaagtctccttcgcacaatgcgttaactttacttatatttactgttaatgtttgatttgcttgcaataaaaatattatctttaatttttttaaaacctatcgtaaataaacatttcaaacaaactgaaaagtaccgcacatcatatattcttaaaacacctaccacctggccgggtgcagtggctcacgcctgtaatcccagcactttgggaggccaaggcaggtggatcacttgaggtcaggagtttgagaccggcctgaccgacatggtgaaaccccgtctctactaaaaatacaaaaattagctggacacagtggtgcacacctgtagtcccagctactcgggaggctgaggctgaagaatcacttgaatctgagaggcagaagttgcagtaagccgagatcgcaccactgcactgcagcctgggtgacagagtgagacttcatctcaaaaaaaaaaaaatgtgtgtgtgtgtatatatatataatatttatcaagtattaaagtttgccatgaatttaaaatatttttcatttatgaaataaagatacagcaaactcttctacctccccatttcttcctccccctccttccatggggtaagcccccccaggggtcttcccatccacgtttcagggtctttccttcatctctgtgtagctgcaagtgccgccattgttctgtttatttaaatatctacatgcttggtgttgtgttatacgaatgttttgctacttgcatttctaagctagtttatttttacagaattaagatgtcctgtgtaggggtggatttgggggttttcttcctgctatatttgttccagagccatctggtgagcacctgaatggattttgagtcagtctcctgccgggtcccgccggggccctgctgggttcctgtggtgggtctgtgatccctcccacctaagcatacctgccacgttggccatccgcagggcttcctggttcttgggcgtcttggagcggttctggctgcgctgtttgctccccgtggaccggatgctgcggaagtggacctccgtggccttgaagaaagccaccatgaagggctgcttgttctggggcccgtgccgcccaatcaggcccgccaacttggggttgatgctctgccctggacaggaagcagccaagtgcacagaagagtagttacaggagggccacgagcgggacagggctgcagagatgctatgcctcccggttcattcatgaactccttattcctccatccagtaagtatttattgagtactcactctaggccaggtactgtttaaggaacttggaacacaactgtgaaagcagccaagaaaacatcctgttctctgggtttccatgcaagtggggaaggcaggcaggaaatataaggggtggggaaccaggctgaggggtgcggaaggtggcaagctagcgaaccccataagtgccactcacattccattggccaaagcaggtcgtggtatctgcctaatttcagggagttggggggcaatcttgctccgtgccagggaaggtgggaacaattgcaaacaaccctaatgactataggggccatctgagcagagatctgggtaacagtgagtgagggggcccaatggatgtttgggaagagtgcattccaggcagagggaactgcagaggtgaatgcccggaggcaggagcaaggagggtgtgttcaaggggcaggggcaagtagcagggacaactgggaggggcagtaggggcacgagtcaggtcgggtcctatgggcaacacgagcacctgcctcagcccagtgtcctctgttgctgatgtcctctaaaattcacacccacacagagcctcaggatgtgacctcatttggaagcagggtctttgcagatgtgctgtcgtcagttaaaataagctcatcctggattaggatgagccttaatccagtgactagtgtccccataagaaggccacataaagacacagatgcagacagcctggggaagacagaggccatgaaatgccaaagattgccaggagcctctgaagccagaagaggcaaggagggattcctccctagagcctttgtaagaggacaaccctgtggcaccttgactttagacttctcgcctccagactgtgagacaataaagccctattgtttcaagccacccagtgagtgggacttcgcatccagggccctggtcaggacaccaaggcgctctacaagaagcaagaaccactggggtgggactttcagtggtgtttataaggccactcaggctgcccctggagagccgatggcaggggtcaacctggaagcagggagaccaggtggaggcaacagaatggtccacgtgggaggtgacgtgagactggacccagggcagtggggagggaggctggtgagaaaaggccagatcctcaagagttcatttttaaaatctttagaatttattttggttttaactttttgttgtgaaatgattatagattcacaggaagttgaaagacgatgtacagggaggtcccaagtgcccttcatccagtttcccccaaaggtgatgtctcgaataacaagaacacagcctccaaaccaggaaggtggcagatttaggactgaatttgggaagggattataaaaggtgtgagaaaaaggggagtctcatgagactggcatgctcttggcccaagcccctggaagaagggagggactgtttaccaaggtagggaaactgaggcaatggagcataagctgggaaatagagggtggaagacaaaatgcagtttcgtttagcagatattgtatgaaatccctacttgacaccaaaaggaaggtgtcaggtgggcagcagaggtctggcctaggcttgatcaattgatcagttggaagagatgagctctgggctagtgagggagggagtagggcccaggcaggttcaaagccctgcctctgtcacttaatgcacagctggggctcaggacacagctttgcacaccctaagtgctcaataaatgctagctcagggcagagctttgcataccctaagtactcaataaatgctagctcagggcagagctttgcataccctaagtactcaataaatgctagctcagggcagagctttgcataccctaagtgctcaataaatgctagctcagggcagagctttgcataccctaagtgctcaataaatgctagctcagggcagagctttgcataccctaagtactcaataaatgctagctcaggacagagctttgcataccctaagtgctcaataaatgctagctcagggcagtggtccagacagtaatgtaagcttgggtgtccccagtgtagagatggcatttaaagccagaagactggatgagctcgcctggggaaagtgtgtacagcctgacaagcaatgtgaaggtggcctctgtgttccactgagaggtcaggggaatgcaacggagactgtgcaggagtacccggtaaggaaggatctggaagacgcttgggcaggaagaatggggacaccaacagggtatggggtcccggaaaacaggggaggaaaatagagggagcaaactccgtgtccgttgctctgcagatggacctaagaacacactatctatccactggctttgacaatgatgaggtcattggcaaatatatatgtaataccatgtctgggggtgatgagtatttcaaagccaaaaataaagcatccagtggaaacaaagcctgttttactcatgacagcacaagctcagagaggctgaataacccgcccagggatacccggcttggaagcaacaaagtagaatctgaacccaggtgaggatgacggggagttgggaggctgagcctctgcagatacggtgcccccaagttagatgggaggggtcagaggccagcaaaagcgatgggcctgttcacatctggaattaacttcacctggagtcccccagacgggccagaagtcaagaaacccagcctcccaggaccagatcagcaccagggggttcactttggttttttaacaactagtgtttaaaagaacaaattttcccccacccgccgctattttaccttaactccctttaacgtttggctttcctgcattcttgagcggggtttcccggagttcacccatctataatttgaatggttctataaaagaaaccattaaagctgagcccctaggaattgtgtttcccccactagaaggcttttagggcaaaataaaaatgcctggcctgaaaagctgatgctgttccagataccttaaatccacgcgctgcaaaaagtctctctgtacctctgagtgaaggtgtctggcttgccttgggcagctgtcaggacagccacatccagggagccacagcctcagctgagaaatgtcaggacagaggggcaagaagtgagtctcaagggtgtttaaacccgcatctgccactaaccagcctgtgtgggctgagagaggcaagttgtatgctggggcctgaatttcctcatctgtaaaatggggatgatgccatgagactcatctgtcccccctttccgtgatagccaaccggattttcattaaggcagttgtgccttacatagcctccaccctggccttagaggtggggcctgtggtttaataaaaggcaactaatcctctggctacagtgattagttcagggatgagcacatgacccattttggccaataaatgaaggagaagtatcctggaggtttctggaaaagaagcctcccactctagtgtccagaaggaagcctgccctctctctctctctctctctctctctctctacacgattgagggaggagggatagatggagccacagaaacagccaccatctggcaaccacaggtgaccatgtttccaaagaggccaccctggtagaaggcagaacagagaccgggtctctcctgacattgctaagtcactggatcaagccagccctgaagcccgcattctcaccccagccactaagatgaaaaacccttcgatttcttagtctgaactggtattttgggttgttcttgcccctttcctagagacttggggacagggagcatggtgccagccatctggaacctgacgtggaacaggtgctctgaggacaggtatggaatcttcccctttgtcaccaagtttggaaaaaggttcagatttttaacctaaaggctgaacaacaccacagcagacacttattcaccttcaacaacaacaacaacaaagggatacagaaaatacactggcaattcctaaaaaaagtttaatatgtagtcttcacgtgacccaacaattccactcctaggcgtgtacccacgagaactgaaaacacgggttcacatgaaaaacttgtacacaagagttggcagcagcattatttatgatggccaaaaagtggaaacaacccgatgtccattaacaaatgaatggataaacaaaatatggtgaatccatatagtggaatattgtttgccataaaaaggagtcattttctgatccatgatacaacacggacaaaccttcaactcgttacacgaaatggaagaagccagatacaaaagccacacattgaatgatcctatttctatgaaatgtccggaacaggtaaatccatagaaacagaaagtagcttactggttgcctagagctaggggttgggggagcagagagtggctcttaagggatatttcggagtgatacggaaacgttctagaatcagacaatgggatggctgcacaacaatgagaatatactaaaaaaaaaaaaaaaaaatcaccaaattgcactctttgaaatggtgagttttatgttaggaaaattagatctcacattttttaaaaaactaaaaagcaaaacaggggtgggaatgacccactcactgtgccttagagggacagtttgtataaataaacagtaaggatgcctaccgcagtgtctggctgtttacccaataaatgcctgcctcaccagcagcagactgggagctcatggcccaccccatcctcaacacagccccagggcagatgctgcaacctcactttgcaaaggaggaacaagactctgagtgaggaaggcctttgagctggtccacggcaaggccaagattcgaaccctggtctgtcaaaaccaaagcctgcattctctgccacgacaaccacaagctctcgtgctgcaaacacacccaaggcctcccttccgtctgggtttacagtcagttctcaactagggtcaaagctccccagaagggggtgggacctacacatgagcttggaggtcagcaccccaggggtggggaggggacaacttcttccaacagctaggtctttttgtccctgttattccttgaaatgtcaaatgcctgactatagtcatttggaagaaattggactgaaatactctgaactcagttatctgactttttcttggggtacagggggctctgaaaacaatacctgatgactgcaaacagaggaaatcacagagaagaacgtaggccctggaacatcttgctcagagcccatttgcgggcagcgacctcccatccatccccaggcgccagcaccggctatacaatctgcaaggcccggtgcaaaatgaaaatgtggggcctcttgttcaaaagtgattcatcatttcaaggtgggggcagcagaagcaaacccagcacagggcccttctaagttcacccacacctgtgaggctggccccatcgcacacgcgtgacgcagagacagggtgccattccacatgattgggactgcaccgtcaatcctgtttcatatcactctgccctttacgtaatatattgcagacatatttccacgtcgatgaaacacacactgaccttctccctggtggccacagaggagcttcccatctggaaacactgagatagaagcatcctttgcctcgtcctcctctcctaacgtaggttctgtgtcccaggcttgaacaactaacttgttttttcattaattcattcagcaactgtttattgagcacctactgtgtgccaggggctggggcacatcggtgaatgagaacacgaccaccctgggagctgactggcgagggagatcagctcaggggtgcacagtgctgtgtctgatggtggcaaggactaggaagaacctaggacagggtggcagggacatgacagtggggcacagtgtacagggcagagtgagccatgggaggttttggggaggaaatgttcctggcagagggaatggcacatgccaggttcatgagaaatacacggtgtgtgtcagcacagtgaagaggccagtgaggctggagaagtgagccaggaaccagagaggttgagactggagatagtgagcgaggaaccggagggggtgaagctggagagagtgagccaggaatcagaggaggtgaggccagagagagtgagcgaggaaccagagggggtgaggctggagagagtgaccgaggaaccagaggaggtgaggctggagagagtgagccaggaaccagaggaggtgaggccagagtgagtgaggagcttgaaggggtgaggctggagacagtgagcgaggaaccagagggggtgaggctggagagcgtgagtgaggagcccgagggggtgaggctggagagcgtgagtgaggagcccgagggggtgaggctggagagcgtgagtgaggagcccgagggggtgaggctggagagagtgagtgaggagcccaagggggtgaagccgaggtgggtatggggctgggtcacctggggtctcccagcccagtgggggatttgggcagggggcgacgtggccagggttctgtggtgggagacccattctgaatgccgtgtggggaaccaacaaggctgggagagagagtggtggtccagaagcgcgtccgctcctgcccgcccctcctccaggccccaccacgctcagggccggcctccctgggatcctcacacatactaccctcctcctccaacaagctcaacaacttaggggaaggatggtctcctgcacccactgctcctgcacagaagccagctttaacgctggctccaaagcttgttcaccagacaggccacagccagcatggtgggcctgcccactccagcgcagtgggcatcggggctgcctcgggcatggtgggatgtttagcagtacccttggcctcttctcactaatgccagtagcacctctccatgtcatgacaaccaaatatgtctccagacattgctacatgtcccctgggaggaaaaccatccctggtcaagagccatggctgtacaaacacactccctaaacaagccaagaaaggaagatgtgtaaaggtgagtcatcgcagccgagtctgacctacaaaacccaagagagaatgtagtgctttatcaagaagagattaatgaacttagaaggtgcatcatgaagcatcaaccagtgcctgaagattcatttactgaacacgtgttcatgcctcgggtactgagcccagcactaccgtgtgctctggggtgctccagaggcaagacaggcgcaggctctggtggggccaacagaaggaaagttccctcccatgagccactaaatgaggaggagcatgcaaattagcctgattacacctaggaagaaagaaatgtaggccaggtgtggtggctaacgcctataatcccagcactttgggaggccgaggcaggcagatcacttgaggtcaggagtttgagaccagcctggccaacatggagaaaccccgtgttgtagagactaaaaaccccgtgttagtagagactaaaaacacaaagaaaattagctggacgtcatggtgcacgcctgtaatcccagctacttgggaggctgaggcacaagaatcgcttgaacccgggagacagaggttgcagtgagccggagatcatgtcacggcgctccagcctgggtgacagagtgagactccacctaaaacatatatatataatatatactataatatataatatatataatatactatatattatatatttttatattatagtatatatatgtttttatatattatacatattttatatattatagatataaaatatacatatactatatattatatagtatatatagtatagatagtatacatactatatattatatattttctattatagtatattatataatatagtatataccacataatatagtatattatataattgtatattattgtatatgtaatatatattatatataatatataatatagcatattatagtatattatataatatatatttatatctaaatttatatatttatttatatttataaatttatataatatatacatattatactatatattatattatatataatatatagttatacatagatatataatatatactatatattatatatagtatatatactattacatattatatactattatattatataatagtatatagcatatatactatagtatatatagtatatatactataatatatatagtatatattatatataaaatatagaagacatattaatatatattatgtattttttatgtgtatatatatataaagcacatactaacgtaggtgctcgtgtacagatgtaacatgtattttgttctaataccccaggaagggctgagaaaggttattttgcaggagaacaattccttttcattttatgttataaaatatcagatttagtcagtgcgcgtaactatttactttgattatttgtatttaaatgtcccggacaagtcacactggctagggagccagcctgcatctgtaaggcataggggcgaggtgagtgaacaaattgatgtaggcaggaaggcaggacctgcatcatattttaaccataaaatctgtatctttgagaaagtttgaaaatatattttagcagaggtttaatagtttttttttaaagcctgcagatttgcccaagaatagcagattttgaaaaaaaaaaacaaaaacagggtgcctgattgaatttgaatttcagataaacatataatgtttgcaatacgagggacatgctgaactaagcgattctttgttgtttgtctaaattcaaatttaactcggcatcttgtattctatctccaagagattctccttaagggtgggatagaaaggctttcctgcggtataataactgagctctctgcaggctgcagctgccaggtgggaaaggggcccggcctacctgacaggcaggtagaggggcccagaggtcatggctttgctggtttcttcattgggactcagtgcttgtctctctgtggtgtgttttgttgcttttggaagtcttagtttttaagttaccatacagtaaaatccaccccttttggtatgcccatctgtaagcactagcgcgtgtacagacgccggtacccagcttcaatcgggatacagagcagctccacgccacaaagaactctctgagctgccttttagctcagtggctcccaactggggtgatgctgctccccaagagacatgtggcaatgtttgagacatttttggttgtcgtaactgagcagttgctactggcattgagtgggtggaggccagggaagctgtcaacatcctacgatgcataggacggcccccaactgagaactacccagtagtgccaaggctgggaaactccgctttgtagtcacatggctccgaccgccggcctctggcaagacactgacccactcacatcactataactgcattttctagatatttcataccaatggactcctgcactcttttgcattggcttattccaacctgcacaatacctttgagatcatccacgtagctgcatttcaatagttcattcctttttgctgtatgtaagtagcataatttgtttatccatccatctggtggcttccagctttggtgattactcatataatgagagacatcatgtgcaggttttggggtgaacttaccttggcattttctgatgtaaagcagaaattgagtcctttacattgccaaaaccagccctttgcacgctgtaggcgccctctgttcacaaagcatcacagctactattgtctgaagaggccaggaaagctgtctgaccagacctttgctccgatggtccagagcagattggagaaggcccaatcgttgcagggaggtgaggcagaagtggctggtgcggaccccacagccatgcccagccccctcgtgcctgaccttcctccgtccatgaacgctgcacattagaccctttccagcatcccctgcagctcctgctggggatggatgctgcaggcttctcagaagtgtcttctccccaaaaaaggcaggcacatgatgagataaacatccttcctccttgcctactgcattttccttccatgcttgtggacatggaggcagccacattgccaaccatgatgagagagcctcaggacaaaatgtcaacactgtcaagatgatggggccggaagggaaaaagcctcgagtctgttgatactctagcccaggggccaacaaactacagcctgcaggccatatccagcccactgcctgttcttgcaaataaaactttattggaacacagtcgatgcacagtcaggaacgcatgatctgtggctactctcacactaaacagcaggcaaaaacgaacgcctgacgctcaaagcctaaaatatgtactctctggtactttactgaagatgaaaacctttgctgaccctgactctaaccaaccctagatccactcacttccagacttgtagggaaaaccatcagtgtcctcatgagataagacatcattattttctattatttgccagtataagtattctgggtacagttgattccatcgttgcttctcaacaaaaatgaaaacccaccaatgtataccaagcaccgtgctaagcccgttccatgcatcgctcctcgctggaatctcccaaggtagaactgtgaccccacatttacaaaggaggaaagcaaggtcacaggcgcaaagtcacctaccggggacccaatgctagggagtacagagatggagtccacaccctggcccagccgactggagcctgtgagctcgacccctgcaccatctgccaatgagtccaggcgatggcagggaaaaggatcccccaaaattcagagagactgcccaggcatagatgtaggtgacttacggggaccccaaaggtaggagggattcactgaggcatagagggaaaggccttctaaaaggagcctggtggagataggactcagagtgagctgaggacagggcccagccgtgcatcctggcaccgctggcaaaccccagacgacttgagcaaaatcggcatggccagcccgaggaacccagcgaactctgcggaaagaccctggagagcaggcagggagcacagtgaggccccttggtaaaggaggggatgcagcccacccacgccgcacaggggtggcatctcggtttccttgtggcttttttgttttccaggcccagggctacaggctacccttccaagacccacagcacaagaatgtttctcattaattgtgaaaaacacattcactccagccatttctctgggtggaccaaggcccaagtgacaagtgagaacttagttaacacttgtgacatctgcctggccccaattacccaattccgccctccccattcttgccgtcccagccctggaaggaccgatccccgccactgggtcatcaggctttctcttttctctccctctccggcttctggacaaacaggatgtgaagcaatcgcatggagcgaaggcaccttggagccagctgcgccgtgggcggcatcgctcaccagccttggctttgtggggcttagtttccacagccgccgcaggcgagtggctcacctcctggctccttcctcagctgccacagctgagtgtcacacttggacagcacatgcccttcaatcctttaaatgctctgcaatcccatccaattcaatctggagtgagcatgaagtaagacacgtgctctcgtgtgtcacaggagagacgctcagggctctctgcatgcagatagccaaaatgcacatgctcctgacccccagcagacttacttcaggaaacaaagatggggtgcaggagggagagaggtgccctatgaccttggagctcagggtatggacagccagcgcttactggagctggagaaaagggtccccaacgagggagtataacatgaggcagacaagggctccccgatcatcttcttggatctgagaggcagggctgattgacatggccctcctgagtcgcgagtgatttcttctgcaaacaaggaagaggagggagacaccatgaaccaggacaaaaggctgcagtccctttcttgggacaaatgacctggtgcttccatgtctgcaaggacgacagtctccccagcccaaaccagtcttcatctctctgcagcaggctttgcgggtagaagacggcacaaggaaaatgggcgtattgatttgtagagcagcaggaagcccttctgaaccatactcagagcctcagacctcatctgcatggcttcacccctacccttcagtacatggtctctcgttcctggtcggactcctcctagaagaatgtgagcaacacaacagccaaatcttcattttgttcaaggctgtgcccctgctgcttcgaacagtccttgcctcattgtaggggcacaacagtccttggctcattgtttgttgagtgaataactgtgcttccaacataggtggagaggctatttgctgtaggaaacttgttctaacaaccagatgcgggggtgggggaagaccatcattcatcattcactccccatgctgggatgcagggcccacgaaaacactataatgtctcttaaaatcggaagataaaacatgaacttttagtgtctaagaaagttttggtttttaattcaaagctgggcacctgcaattccagctactcaggaggctgaggctagaggatcgcttgagcctggacagcctgggcaacgtagcaagaccccatctcaaaaataatcttaatttttaattcacccagaattataatattcatcttgatatcaacatggccataaaacatactttttaatttaatttttttttttgagacagagtcccactctgttgcccaggctggagtgcggtagtatgatctcggttcactgcaacctccacctcccgggttcaagtgattctcctgagtcagcctcccgagtagctgggactacaggcgcacaccaccacacctggctaactgttgtatttttagtaaagacggggtttcaccatgttgcccaggctggtctcaaactcctgacctcgtgatctgcccgcctcagtctcccaaagtgttgggattataggcatgagccaccgcacccggccctaattttttttttttttgtaatggagggaggagcccatagaagtcaagggcagccctggtcacttctgcaaagggggctcccacagtgagtcctgcaagaagcctactgtcttctgagtgctttttagaaacactttccttcccaggtgaaaagccaggtaagacctaacatgttagagggtcctggggtctctacctccggatggccaggctgggtcccctgcaggggctcatctgcccctccaaaccccatcctgaggctgcagcctggtgaacacattccttggaagattttccagcaaagaggaagggagttggagtcacaatcctctggccaaagcccagatctacacctgggagtcatgagaaagttccccagccttctcagcttctatttcctcatctataaaatgttggtgatatcaattgtgctacctgggcaggattattgagagaactaaataaatcaacaattagaacttctaacattcatgagcacagacagggtgctgggcccaggattcagcatgttctgagaactcactttcttcttccagccgcctacagaatccgtgatggtattatgttcatggaacagacaaaggaacaagaccccaagaagttggagtagctgctgagaccacacaaaggtgactgaggagctgtgctatgacaggggcaggggtgccagagtatgagtgtgcaggggttgctagtccatcctgcttctaaaagctgcacccacactggaagctcagggcctggcttgtagggagggttcccctgccttaaggccacaaggtgggaggagccccgagctgcaggattccctccactcaaaggtgccttgcctctcctctcctctcccctcctctcctctcgctctcctctcccccttctctcctcttgctctcctctcctctcccctcctctcctctcgctctcctctccccctcctctctatcctctcctctcgctctcctctccccctcctctctatcctctcctctcactctcctctcccctcctctcctctcgctctcctctctatcctctcctttctcacagggctctgggcagtgctagattcaccccgggtctctgacaccagcatccagcatgggctgtaggacacagccagtccatgggtgggaagcacagcctgggggctggaacaagtggagaggctgcctctcctctcttctgtattaagggaaagacaaacagactccagccctcattcctgtagcaccagcccatccccagggagatgagaccaggctccccgctcggcctcctcctgatgagctgcaggtgcctgggagtttataggcttctccccgcgagggcacgctggcctggagcagagccccagctgcggctgctccgcatggtgactcacaggagggcccagctgggaggaagagggaaaagacgcacgcttcctgggtggtctcagaagggcacctccgcactttgacctcgagaccccccaccacccgtggccagatgggagggaaggaggacgccatctgggctttggagttttggagaccactggcaggcaggggctcatgtggggttaaacaccagccttctgaaagaaggtctgcgatggctgcgccccgctagaatggaaacacgctggcccaaattactatcctccacatgcccattgtgtgcatgagaaaagcaaggccccaggaggtgtccgggctccaaattccagcagctgctgggggctcctctccacccacgcacagtgtaactgcctagtggttgcaaggttcaggtgaccctgtctctaccccttctggatgatgacatgggcgctgctgcctgggcacctgtcttctctgggtgctggtgcaggcaggatatcctctgagttaatatcagtaagaggtccccagggtagggaccagggtctctgcagccagctcggggccaggcacaaagcaggtgtgcactgatttgtcggatgcacaccgcctcccacaggccctgctgcccttccccgtgcaggatctggcaggggagggttgagacccagaacccgaggggtacctgtcagcccaggcaccatcttgtaaacaggctgccctaggcaccgtgcacgactttgccagagtgttgtcactgggccaggcctcaagttacccaagtcttcttttagaaggtggctaaggaataaaaagctacatactgggtgcagcgtgcactacttggctgacaggagcactagaatctcagactttatgatttgcccacggaaacaaaaccacatgtacccctaaagctactggggaaaaggggcatattcctgggcgcatcctctgagatcccccacggtgggtctgaaatggagctcaggcacctgcatgtgcagtttgccccctagggtgaccctgaaggacgccaggcttgagatcctccacggtagggaaaacaaagcattttcacagccatgatgtctcgaaaatcccggactcacttgctctttagctcacccccaagaggtccaaaactccacacagccaactggccattatacactttgcccctccctgacaatccaagtgggtgatcctcccccgacttgggcaaccacacaaaactcactgcctgggcgcgcacagcacctggacaagccaagtcactgggcggtggcaccacacccggcccccagggccctgcccaggaggagcaaagatggtgtcccggagtcagagggggacagggacacagcatctaatccttgatctgactctagatagcaacctgcagccactaggctgcaaggaatggagagggtctcaggtgggctctgaaatatggagccccggcgggttctcaggagcctccatttcctgcctgcaccacggggatgtgagccacagcatctaccttgctgggtaattgtgaggatcacaagagacagtggtgcttcgtagcaaccacacactgagcaattaaactcttcacttgcatgagctcatctaatccctcacaaccgcccttggagatggaaactattattaaccccattttccagatgagacacattaagtgactcaccctaggtcacaaggccggaaatagcagggctaggatttgaacctggggagcctggctcgggagcccgagctctaaccatcaggcagcactgcctccaccaatgctgagcctttctccataacctggacaatgggggagtaggtgctggaggtgaaaggggcaaaaggactctgactgtgtctggggggaatgatgagggcaggactggtagtaagaggagctggccacagggctggcgtcaattaagacaaaatcacctgagccagcagaacaggcaagacagagaagcacagaacccactggggcccagttggaaggtttccccaacatctacaagtccacagaaatgtgttactaaaaatagaaaaattagccggtgtggtggcgggcgcctgtagtcccagctactcaagcgctgaagcaggagaatcgcttgaacctgggaggcggaggttatagtgaatcgagatcgtgccattgcactccagcctgggtgacagagactccatctcaaaaaaaaataaaactacaaatagacaatgccacttcaggaattggtcctagagctacactcaaacgaaaaacgacctacacaccaaggtttcccactgaagccctgtttgtgagaccaaaagactagaaaacacctaggcatccatcccaggagagctgggtatgtcagttttggtgatcatgatgacgaggatgatgactgctctcctttacatgtgtattacagttaggtcctgttctaagcctcattactcaaagcacggtccagggaccagcagcttctgtcacctggtggctgtctgagaacacagactcctctgccccaggccagctgagtcagaatctgcattttaccaagatgcctgggaaaatcctacgtacattaaggcactatttttaaaaactcttcccataataacccattacatcttgtaacaacccaatggcccaaatcctctcatcacctgcatgctggatgagaaagcccaggctctgacaggttagggaaattgtccaacgtcacacagtgtgtgggtggcagagctacatggacacaaaacacatggaacaaggaagctctttaacggctgacaggaccagtctccgagataagtcagctggagaacactgtatatgccaggccaccatttatgggagaggggaaaaacagaaagccgaatctccatgtaattgctgaaatacccagagagcatctctgaaaagacagaaacagcagttgtccctgggaagtggaactcagcagctggagaagaaagtgggagggaaactatttagtgttacacatgtattgttcatagctccaaaggcaaacattgtgaaggtgtttattcaaaaataaatgaaaaaattgttttgttcataaaactggtggaaggaagaagctacacagctggaaaccatcaccactgaattttaagcaaagtcaagctacaagatatcatttcttatctgtttggggtggggaaaaattagcatagagaagtccattcccacttctccactcaccatccttccttcttcccttctcaaaggaggcagaactgtagtgggaatgagaagtgttggggagggcagactcacaatggattctccaggaactggagagtcagacgcacattcaggttctaatgtggaagggaccaatgccttgcacaagggcaattttgtcccacagggcacaatctggcgatgtctggagacatttttcggtgtcacaactgggagatgctactagcatctagtgagtaagagaccggggacgctgctaaacaccctgccgtgcacggaacagtccagaatgtcctgtgtcctgtggtgtcaccttggggctctagttaaagtgcaggttctgatgcagcaggtctggggtgggcccaggattctgcatttctcataagagggctgccctcacccctgctgatatgggaccaccctttgtgtaatgaagccttacccaattctgctatgaccaaacatgtaatcttcttgtgaaaagaggggaaggggctgcttctggtttggatcaaaaggctgaacatggagtactggttgggaggggcggggaagcctgtttgtagtgaagcaagcatgagcactgctgagaccctcctgaagtccaggagcacaggctgcattaggactggcagtggccgggggactcaccatccagcgtctccaccgagagctgcaggcccaggttgtgccgcggattgaccacccagtggttgctggtggctgtgatgtcaaacaccagccagccctcctccgaggcccagagggtacggctgtcgagcaggaagagatccgattccctgcgagagaggaggagagacacgggcttcgcgttagccaggtcacagctccactaccccaacagatgggaagcagagcctcatggggtgggaggggagggaaagagtccactggtccccgacaagtgggaacatcagaccaagatccaggcacaaagacccctcagtagctgtggtgaggaaagagagtgcagaagagctacaaagagatacacgcagggaaaaggcagctgttacaaggcaatctcaccccataaattgttaagggcatcccagcgggacagagtataggaagacagggattatgcagcctccgtgttgctggaagagtctcagagagcagaagttgatagtgactgaactattcaccatgtgccagatactgtcccacgggctcaacactacactatctcattcaattcccacaacccgaagctgtgggaatatcatttccactcaatttatggtaaagccatgatttgcccaaggtccaaggtcatttaaccaggaagttgccaagctggggtttcagcccatttacctgtgtaccagagcagatactcttcatttccaggacgtgcaccatctttatgagcccaccaagagttaggaggtgaatctctggactgatggtattaatagtgaaaatcctttcattctctcttccttactttttacagtagcaaaatgggtaaaatcataattaacttgacaggggatggagggtgaatgggtggttggatggatgggtagatgggtaggtgagtgaatggatgggtacgtgggtgaatgagtggatggatggatggatggttggatggataagtgaatggatgggtagatgagtgggtgggtggatggatggatggatggatggatgagtagatgggtgggcgggtaggtgaatgagtggatgggtaaatgggtggatggatggatgaatgggtagatgagtagatgaataagagggtaaataagtggattgttacatttctggatagtagaattctagtatgaaagatcttcataacatttcttgcacacttttaataagaattcaaagtttcaatactttgagtcctttaatagtcaactagaatatttatacctctgtgttgtaccagaaaccaaggcataatgatgaacaacatgacactggtccctgccccagggcaacaacagtctctatcatacctggagttatctaatcttcctggtgattatagtgaatcttgtctgctcacacgtaaagatgtcaggcatatcctttatggagcacttaccatatgccaggctccaggttgaaatgcctgaccagtctcatgtcacttagttcttacaacactctgtagggtagataatattccccatgccattgtgcagaactcaaaactcaggatccgaaaggtcaagttgtgtgcccagggttatgccactaggacagtccaggcaggactggaaaccaaccaggctacctgcaagcccaagcttgcaactgtacacaaagacagttcttctggacactgccttttcagagcctttcaccagtcaacctcgttggaatgtaacccactaagccacgggcaggagccgagccactcatgtcccctttgatgaggcacacatctccggttggctccagcccccagctctccgtactaacactgcagacagccaccgctatttatcttcctgtctgacctggacaactctaggtttgtgaggtctgctagatcacccttctgctgcatgccataatatgttagacattcgtcaggcacatcaatgtgaacaaggctcagagaagacacacgggaaacagacctgtaatgttagcaagtattgggagattaacagacccggagaagcctacacagggaagaagaaccagggtcagaaacagacaggaaccgaggcaggtgcgagggcacagcgcaattttctcaggcacaagcacagaaggaacgaatcggagctgcttttccctctgggcctctctccatccaaaactctgggggacagaatccagttggcccagtcaatctatgtgcccactcctagccatgggagggtgggcaccccacagcaatggacgcatcaccaggaccacagatgggcgcaggagtcacctcctcccatgccacctcaaagtctcctttttaagtaatattcaatgacccccagaacctgattcagaaaatgcttaattctgttattgctgtggtttcaatgttttgtccttcccaagactcatgttgaaaatccccaatgcatcattattaagaggtgggccctttaggaggtgattaggccattggggatggattggtgtctttatgaatgggtttgagggagaaagtctggaccctttctgtttttccatcttcggccatgtgaggacacggcaacgaggtgtcatcttgaagcagagggcagccttcaccagacactgaccctgccagcgcctagatcttggacttcccagtctccaggactataaggaatgaggtatttgttttttgtttgtttgtttgtttgtttttaaagattgtaaaggactcattcctctctcaagcacagagagatgacagaagcaaggaagtctttttagagccacacaggactttgaagaccctaagtttacctttcacatccaaactgaattaaagtcatgagattatttttcatgactcatttacttcttcttccccatgctcttttagaggtagtttcaggctggcttcggggatgtctacacagattttaaacttataaacaagaatttcctgctgtcttatctccagtttgcctggatgactttcctggctttgaaaagctaccaaggttgtcaatgaaccattagcgattctcaacaattaacagatgagacaagaagcaccactccaagtcgaaacaacttctcctactgaatcaggctcccaaggcccctgtaggaaatatccacacctcagcacagaagtcacaaacccagatggtgattttgctggaaaattgttattagcaggaaaatgtgaccagatatctggacaggccctcgaggacagtaaaacaatgaatggtaaccaaaggaacagagtgagacctttaaacagagaacgcctcgccaaacgatactgagcattctcttattgcaggctatgacactgaggccagatgctacaggccagcactgactcatccatgaatcaacgtgaatgcgtcaactcccctccttcaagtcatagtttgcaatttgtcccaggcacacttaggagagccaaatcttcatcagaaggcactgggagacgggagccttgctgagatgggtcgagtgtgagatgctaacacgggctttgctttcagactgagagcccaggcatgaggttggacctcatggaaaggacaaggaaggaattactcagcagccaggtccagtctgacagctcggagagggggaatttctagctgccaccttgagcatcgtaaaagaacactggttcttacaaccaggagagcactgaaggagccctttgtgacatttttatttaccttgaacacactggcctccccggcccagcccaggtgagagaagaggtaaggaaggctcagggtgaaaggccctgaggaacctaaatgcgttctttcaccttcgccactgctgagaatctcggtgctttccacgcctcggttctctgaatctccccgccagccctatgaaatgatcaaagtcctgttactgttttacagatgagaaaagttggggtcagtgaaatgaagccagttgtctccagggacacacctgataagtggcagaaccaggcgacagcgcaggaaacctgactcaagagcctgagcgcttaaaccctgccacctccttcactcacctggggataagagacacataggaagatgtcaaatcctgtatgatacgtgttgtcatcacagcgttgtgtggggcagagaaaatactagagggggatgaaacccaggtgatggagaagggataaggcaaggttacgccagataattcccgtgtcttggtttcctcttatgtaaaatgagaataatgccatcttcttcaatgattaggaagagccaggttaagaccagcctggcagcaaactccaagacactcctggaagagcatctatacttattacaaggtatgtcagtgttggtgtctattctctgctaaacttcaggaaatcctaggatggggactttacatgtcttggtcccagaggttatgtgacttgcccatgattctccagtcaacagaccacttgtccattccaagaatgtttaccttggactccaaaatttgtcagaaaagtgtcctatgttcacagtagtgttagattttctgcaaataacagccaccaacaattccttgtctctgtatgcacatgctgctgtcccataaacttgtggagtctgttccccacctctgaagtctggactgaccatgtgatctgctgtgaccagtaggacccagtggaactgaggtcctgccaggctcaggactaggactcaagaagcctatcatttctatttttgccctctgggaaggaagccactgaatcgagaaatctgactacactgctgaaggaagagaccacatggaggggaaggaggcacaggtcatggaggataagggtctataaaccagagagagagagaaaaaccaagccagtccccagtgaggtgccatctcaggccttccagacctagtcaagctcctagctccatcagtgactacagcagataccagaaagagtagaagaaccacccagctaagccctgcctaaattcctgagcaataaaacgatgttgttttaagccactacatatgagtggttagtttcagagacagataacccaaacaacagtcacattgtttataacagaaaaactgagcactaaccatccagtgagagggactggtaaaaacattatggcacatccaaggcaacagagccctgcacagccgcttcaaaggaccgtataaatctacacttgttgacaaggtggaaatatgataggaaggtgctaagaaacagaatttgtaggactgaaacttctgggaaaatgcaaaatgcaaaaattggtgcaaaaagaaatgaaaattttgatttgcccaaaagaaactgaaataggaaggtctttcccatccccataccccagttggtttttttttttttttttttttttttttttgagacggagtctcgctctgtcgcccaggctggactgcggactgcagtggcgcaatctcggctcactgcaagctccgcttcccgggttcacgccattctcctgcctcagcctccccagtagctgggactacaggcgcccgccaccgcgcccggctaattttttgtatttttagtagagacggggtttcaccttgttagccaggatggtctcgatctcctgacctcatgatccacccgcctcggcctcccaaagtgctgggattacaggcgtgagccaccgcacccggcccccagttggttttataaccacagattttgcaaattatcaacagataattctttcttatataatttgatcaagaacatggaagaaggagtgtttgaaacccatattgtaaagctagcacgccactgactcccaaaatagagaaggctaatttgaacagacattttcctaaagaagatgcacaaatggccagtgagccatgaaaagatgctaaacatcatcagcaaccattagggaaacgcaaattgaaaccacagtgagacagcacttcacacccactaggatgactagagccaaaaccacagatgataactagtgttactggcaaggatgtagagaaagtggaactctcatatactaatggtaggattggaaaatggggcagccactctggaaaacagtatagtggtgtctcaaaaggtcaaatgtagaattaccatgtgacccagtaattcagctacccacagaagcaattaaaatacatgtccacccaaaatcttatacaccaatgttcatagcaggattattcacagccaaaaaggtagaaacagccaaagtgtccatcaactcatgaacagataaacaaaatacagtcaattgatacaatggaatattatttggcattaaaaaatgaagttctgataaaggctacaacacagatgaatcttgaaatcattatgctaagaaaaagcagtcagacttaaaagattgcatagtatatgagtccatttctatgaaatgtcccaaataggcaaatccataaagacagaaagtagggccaggtgtggtggctcacacctgtaatcccagcactttgggaggtagaggtaggcagattgcttgagcccaggagttcaagaccagactgggcaagacggcaaaaccccgtctctacaaaaaatataaaaattggccaggcacggtggctcacgcctataatcccagcactttgggaggctgaggcgtgtggatcaccctgaggtcgggagttcgagaccagcctgaccaacatggagaaaccccatctctactaaatcacaccattgtactccagcctgggtagcaagggcgaaactctgtctcaaaaataaatgaataaacaaatacctagatttatatatttttatatatatatatatatatatatatatatatatatatgtatataaattaaccaggcgtggtggtacatgcctgtagtcccagctactcgagaggctgaggcaggagaatcgcttgagcccaggaggcggaggttgcagtgagctgtgatcacgctattgcactccagcctgagtgacagagcgagaccctgtctcaaacaaaaagaaaataaaagaaagtagattagtgtttgccaacagctagacaggtagggaaaatgggggtaactgttagtgggtatggagtttcctttcggggtgatgaaaacattctaacattagacagtggtgttggctgcacaactctgaatgtaccaaaaaccactgaattatacacttcaaatcttaataaagctattttttgaaaatggataaggccaatctaagccccaaatatagagtatggtgccattatgttaacaattgttttaaagtgtacacacagctgcatgaaacatttacacgcatacacaccagagtggtagcaacaattcactgtgaagtattttgcttccctttacaagctaacacatgtacgtcaatattgtctcaatttagtaagcatgccctatttctggaaaaagctagatctgtatggggcaacatatttccatgttatacttgaacagcagaacaaacctaggtgagggggcaagcctggctctcatcttctttcctgggtttggacagttttttccactcctctaatctcagagaaaggcagcagagccaggggacaggccacacgtctgttgtctataaacttgatgatccttccactttctcaggctgtttctgattaaagaaacagcaagaccccaaaagtcgtcttctcttctcttctgaaactgggttctcccatagccctgctctgcaaggcatgaaccgctggtgaccccaatgccgccgcactaagaggcgttaatatttaaccaccagcctggggacagcgtgctgctgggctttcaggtgcctcctcccaaggacgcccaggtgaatcggctgaaatctaattctaggggagcaggacgaggaaccgcacatccccaggctcgtttccagtgtctcccagcccaccttcccctggaaagttctaccacaatggaaaaggggatattttaaaatctcaaacgtgggaaggcaggaagtcctttttttggcctctggctacctacctagaggctatttagagactgatcctcatgggccttcacccaccacccgcctcccaggggagtaagactcccatgtgggatgcaggacccggcctcagcgcaaacacagatccagggaagatggccctgaaactgccccagggcaaaacagagcggagttgggagtctgaggatctctctggccctgaggcacccaggcacgcgttggagccacaggaaacacgaattccaacatggccacacagtgcacactgtctcgttacctgggacagtccccatcctgtctgcgcccaccatcggggctccttcagcctcctgcccctgggcccagccatccagggtcttaggagcagaacaggcccttggaaatccattctggtcattttaattttcagcttggaaagatgagagagtttttgtcttgcgcatgggcagctggtggctgaacgaggattagacaccagttctgggccataatttagggcagtgtaatgaaaaatgttctcgccatcacagcctgagagccagcctgatatccccctctgctaccttcagacacagccccccaccaccttcagggagcaggcgcaagccagggttggaagggccgcatgtggaatcacccggctggtggccgggggccctcagcaccctgacacctcgtactgggcacctactgcacactaggctcttaagggacactctcccacctcctcctccctcctccaatgaggtcagtacaatccgcatccccacttaatatcaccttaataccacctattacatggggatggggattgtacaaaaactgaggggcagggaggctcaggacacgcctctgctgggagcaacaggccccaggccagaggttactcgaagcacagaaagccatctccaggagccccacccaagttagaggaggcagggcaggagaggacggggctggcccaggcccaccatcaaaaaaaaggaaaacacacttcagatgatgtggtaggcagaataacaccccctcagacacatccaggtcctgacccaggaagctgtgggtatgccacctcccaggccctgatcccagaagctgtgggtatgccaccttccacagcagcagggactttgcagatgtgatgaaagatttttgagttgggagattatcctggattatcctcatgggcccaaaggaatcataagggtcctgataacaggggaggcaggaggccagagaataagctgtgacagcgaaagcaggggtcagggtggtgtgactgcggctgggaaccttgagccaagaaagggggctctgtctcctagaagccagaaacaacaaggaaacagatcctcccccaggctctccagaaaagatgcagccctatggaccccctgatttgggcctagtaaaacccatttcagacttcagacctcccaaactctaagagaataaatgtgtgttgtcttaagccactaagttggcggtcactgggctcagcagctggaggaatgaatacagtttctctcctgagatccacactgaaacgcctcctctccacaggtgctctgctaggagccagagacacagcggcagccagagatggagctccgggtccagaggctgggcgtgcgtagcacacaagagggtcattcaaaccctaattaagtggcgtgaaggagggaagaggcctctgggtgagcaagacaaaagaaaaggactagatgtgaggtgtgagggtgtgcggggaggacgttttatagaaacatctcccgaagggggtcagaggatgagcagaactaacacagctaaaagggcagggaaaagcgttcccggcagagagaaccgaatgcggaagtcatgatgagaaagtagtgaggagagggcacaggtgcacgatgtcccctgcagggcctctggccgcgggaggtcaggtcttgctgagcgctgggaagccgggaggagttctaagcaggagtggagatgacgggctctgccactcgcagacccagctgactcgctccccgacccctagtctgaccctcgccctcgcctcactctgctgctctttggaaaactgcaggccggacattctgaaggcctgcatgttgtgaacggttgctgggccgcaaggatattcctcagaagaaaaggagcaagagagcgagccagcgagcatggccagagcattcccaggctagcatgatgtcatggagggagcacaggcttgcggctgcggtgagtcaggccgggaaactgcaacccgccgtgcacctggagtcagcccagcagcaaccccagcctgcagggaagcccgggaaggagatcaaaggagcccagaaggaagccggccccaccctggcagccagctcccgggtccaaggggtgccccttctgagctgcaggctggggaggactcagcccgggccccaggctcccccacctcagcttcagggaatgccctgctttcctgccaaatcatagaacagtccctggcatcccccagacgggaagaggaagtcagggaggtccaaggctttttaaaaatacactttcttgaagacggtgcatatccaggaaggctaaaattaaagctttggggagtaaggtggaaaaatacacaaagaggcacaatatcctcctgccccagacagagctcgggtggccacccacggccctctcacccaccccacggctgtctgtctccctctgggcagggccagctgactgcagacagcaccaacccagccactcatgggaaagtcaggaagatgcccgtccagcacccggaggccagcgttgtcacagtcagaaggcgagtcagtggcccttatgttctagccctcagtttctccatccacaagacaaagggtttggagtttatcaaggtctcaaaaactgcaacttattaataggatagctaagagaggaaaatgagaggatcaaaaatccaaaatgctctgtggtgaaatgaggttgggaagcaccacatgacacattgctccttagagatgtcataatgcaccttagctctttaaaggctctgaaaagtcctgctgcaaagaaatgtctgctccggcaatggagcgcagtaacgagccgttcaaacttgtgtcaaggtgtggatcacagaggctgggggtcaagagggaagagaaatacagcgacaaatggaaggctctccctcattagagacacagccaccagcagagacaatcagggggtgagaggcccggaatcctctttgtgatgaaatccccagagtggtcctcgggtcccacagtgggtgctcagggatgtaggctgtagggctccaggctctgagttgaggaaaattggagttaaatttcagtgaagtaaccctgagcaagtcagtctctgtccatcaggttcttttgtttgtaaaatggaggtagccatgaggattgttctgagaatgagttaaatggaaagatatgctcaagatgccagcgcaaagccagagactcaaggttcgcagctggttggagcaaacctcaatgtcagtgtgaatcttccaccatgggattcaagctgccttggctctaaagtaagatcacagctgcagtgagctgaccccaactcaagatggaaccatcttagaacaaggtgcggagcgagccctctgaaccgtatggtacctgagaggcgagcactgttgtcccctctcacaggtgggagactgaggctcagagatatgcaggtagtgaatggaaccaccccagagccttgttccagcaaagtgtcacccctgcacggtgatggtttgatggtggagggagagctaccacccagagaacccgggggttccccttccactcttctcaccccgcactccccctgccccagcagcttgcaggggctgagcaattaacttccctgcctcaaaccctttatcagctcttaggataaaaagccaaagctctctaatgtgttctgtgataaagaagactatggaactgacagtccaaaccgagaaactggggagagagaggaggcattattgtcaactccaggtcatccaacctgtaaggccctggatggtccggcccctgtctccacagcctcctcccacccagccctcctcatctgtgccagtctccagcccaccacagcccctcacacatgctgtttccgctgcctgcaacactgttccctgccttttcacctccctcacacctgcctgttcttgagcatcccagggaagcgtccactgatgccctaatggtgcatccacgtcggacacgctccaagcccaagtcctctcccctgcgccatctgggctggagtttcagtttgtttgtatagttttttgggttctcctcttttcctgccaggttttaagctttttgtcagcaagaaccagccctattttattcagccctggagcggcctctccaccaggcacacagcttagcacaaagcaggcctcagatgcacgctggacaaatgtgctggtatcctctgcatccttatggccagtaaggttttctggtttcacttccaatagtttacattattaaaagagaaatggtaaatactttttcagattattcaggtagctccagaaatggctctgactcacagttcactggggccttagcccacccagcccactctatgtcccactgggcacccacactcccaggccatgggcacccagctgcacatcctagttgaagggaaaccctcatcagcccctgggcacctccataccccccaccttcacaggcctggctatggaaccagggggctgtcaaattacctcaaattgacccctcactggaaactgccaggctgcatgggcttccggttgagtgcccccatttactgtccccatcacctcttcggagccacctcctttccccacatcaggcaaaaatcaagaggactcaggtgggcagaaagcaacagctgggaagaaagcacatctcacatttccttttggacctgactcttgtccctctttgcttaagatatcagggtttgagccccagaatttctggaaaactggaggctctactgttccattcaacccaggcatgatccatccagaaacccagtggaactgagccgcgagctggattccagctcacagaacacaccaagaactctggtgaaacatcaagaactctggggggtccccccagaaaaatctggggggcactgcagagcttctgacacggctctgggggaaatcccacacggatgggcagctgcctgcatctggcactgtggaggtgggcgggcagccatggaggatggggagactcatctttctagacttctcctggggaccgcatttcctccagcctccaggtccagaccaaaatagaatgaggtaaattcagcccctttcctgaagcacactcaaggaataaacaagcaccacaaatacagtcttcgggctgggtcatctttccaacctcatttttttttttttttaagagaaccacaggctgttttaagattccaaacccagagacagaaaaagtgcagcaaagcagggcgacaaggggaaagaaacttgacagtgctttgcagacagaaacaagtgacgcaatttccaaattcaagattctcaaaaacagaggctgggttggaacatctagagaaggccagagcgggctgttctaagacttattctcacggtagcatcctgaagccgggggggtccaggaagggggcaggctgaggacatcagcttgcacttggtaggccctcaccaggtcccagaagctgtgccggtgccaaagctgccccttgccaggaagccctcccggctgccctgtgtggttgacacttggcctctgtcatgcttcagtgaccccagaggcaggtcctgagtcaaggacttgaatgcaagtagtttgtctgagaggtgaccccaggaaccacctggagagggcggggaagtaaggcaagcttggagattgtcaaaacagaacactgtgggcctgggacttcagcccgtcagaacctcctggagcagctccagaggggtgcacctgaggacgagggcgctgtctcctgagggcgagggggctgtctcctgagggcgagggggctgtctcctgagggcgaggggctgtctcctgagggtgaggggctgtctcttgagggcgaggggctgtctcctgagggtgagggactgtctcctgagggtgagggggctggggaattctccatagaccttgactccgactcctcagtgggtcagagaaagttccccgcagagctcccacataggggaaggtgtgtggggaggggaagcctcgaggtctgcggctcagcgggtccatctctccgaggaggagtggaggccctgtccaaggtggcagttggtgaggctgacatggtgggagtcaccacctgagcagccagacatgggctggaggagaaatgctgtctacattcatggcagggacccccgccaggacaacctgtggtggcatctgcagagaaaagactcaaacaccagtgatgctggggaagctggaggatccctcttatgtccaggagccagactagggcctcagagatgcttttcctactgcaccgtgagcccccgcatgtggaacacccaaggggaaagggatggaggcaggactcagctggagaaagctttccaaggagaatgaccatgacaggtttgttgggaggctcctggttccagctctcaatcccacttgcaaacctgactcccaaaccaccccacccaccctctcccacttccgggacctgtgggttcaaccccagagcaagaggctgagcccgctccctaagcccacagcatggaggggaaagagcctgctattgaggacacctcaagtgccatctttaaagcgcccctaactaggccctggggaagagttaggagacaaagaacccttaccccaaaaaggctcttataatctcatttccactcaagaagcaaagccacatggagtgctctgtgccaggcactgaggtcgccatagctgaaagcccaggggttacaaggactccagtctggggaccccgtgtggctgtgacccacgtcactcaagttcagaagacatcgagccacagccagagtgtagggattcaggttgaattttaaaataggtggggctgagatagacggagcgatagtgggagaggactctgcatcaactccctccaaacgctgggtgactgtcactttcagaaacaagcaaagcaggagaaacacataggcaggaggagccccagggaatgtggccactgaagggtaggtggcgtcctggacaggacagaaggacaagaagtaaaagcaaaggggtccggaataaatgattgactttcattaataaaaatgcagatgctgggtccttaattatgaaaactgtaccctattgatgttaggtgttaaaacaggggaaaccaggcgtgtctgcgcatctgtgtgctgtgtctgtgtctgtgtttctgtggatctgtctgtgtttccacgtgtttacgtgtacaggagacagctggaaatgaggctggggctgaaaggtatctgtataaagatacctatcaacacagatatcaacagacatctgtatccagggagatggcaaggccagggccggcttcatgggcatctgacccgtgcagtcacacagggcccgacacacagaagtacgccgagcttggtttcatgctctgctgttgctgtcttgaaatcctttatacatttttgacacattttcattttgcactgggcccagaaggtgacacaaccagtcctgggagcttgtttttaaacattcatgatgaaaactcctagcccctacacctgactagttggggttaaacatgggaacctgtatttttctcttccaatatatttccaggaggttctgacaacagctgggtttgagcaccacctcggacagatgtgtgtgaggagctgcacagctggtgtttggtggtagctggtgtttgtttggtggtagctggtgtttggtggtagctggtgtttctttggtggtagctggtgtgtgttcggtggtagctggtgtgtgtttgctggtagctggtgttcggaggtagctggtgtttggtggtagctggtgttttgtagtagtagctggtgtttggtagtagctggtgtttggtggtagctggtgtttgttcagtggtagctggtgtttgttcagtggtagctggtgtttgttcggtggtagctggtgtttgttcagtgatagctggtgtttggtggtagctgggtttgtttggtggtagctggtgtttgttcggtggtagctggcatttgttcggtggtagctggtgtttgtttggtggtagctggtgtttggtggtgctggtgtttgtttggtggtagctggtgtgtgttcggtggtagctggtatgtgtttgctggtagctggtgtttggtggtagctggtgtttggtggtagctggtgtttggtggtagctagtgtttgttcagtggtagctggtgttggttaggtggtagctggtgtttgttcagtgatagctggtgtttggtggtagctgggtttgtttggtggtagctggtgtttgtttggtggtagctggcgttcggtggtagctggcatttgtttggtggtagctggcgtttgttcagtggtagctggtgtttggtggtagctggtgtttgttcggtggtagctgttcggtggtagctggtgttcagtggtagctgttcggtggtagctggtgtttgttcagtggtagctggtgtttgttcggtggtaggtggtgtttggtggtagctggtgtttgctggtagctggtgtttgctggtaggtggtgtttggtggtaggtagcagtgagcaaggtaagtgggaaggtgggaagaagacagggtgggcgagggacttcccacttaagtatgttcaacttcggctgtgtcacccagaggtacttgacatccctccctccctccaccctgtgcttctcagtcagggcctagttagaggcccttttaaagatgggaccctgacaatatctggtgacatttttggtttcacaactgagtgtggggatgtgtcattggcatctggtgggcagaagccagggctgctaccgaatgccctactatgcccaggatggcccttaaccccagagaatgagccacccccaaaggtcactactgcggaggctcggaaaccgaaaccctgcctcaaatgacagggtataaacacttcagctctcttgacgggactaggatgagggtgcaactttgtctccagaacctctagcaggaagagtgagccaaagtcacccttcggggtgctctgcgcagcaccgctccctcacctggcctccccatctccccactgcccgatgctcctaaaggcctttcctggaaacactttctaatccttcactctcacagccacacaatcctcagctgagggtgagctttggagaaacctgacctgaaaccagtggccaacaggtttcacttgatggcagcttcactcaactggcagtggctgccttatttagagacctgtaccaaggatccagggaaagggagggaaagggatccattagcaatgcctgccttggtcccaggaggagaagggtggcatgcgtgctggaatgcaagaccaggtgtcagctttccttcctcctttcttggggtggcaaaatggaaagccatgggcattgttgaggaaaaagaagaacatggcaccgacagaggttgcaataggaagacaaaggaagaagcagggtttggaagaaccttgagtatttacctacatgcctacttccaatctgaacttgaactagcttcattaactgtggttgtctcctttaaaacatcatcatgttcctggtaagcctgtattccccacccttagagttagtatttgagcagacacttttcttcccagctacagatgactgcttgtgaccaaattgaaaaatattaattctctttgtctcctgccaaaaaagctaaagcaattacagatcctgattcgaaacatagatgttaatacatttggaaaaatgagcttctataggcgagcagaggcccagggccaagcatgaagtgcttttggaatcaaagtgccaaatcaagttatccagagagctgcctccacgaaagcccattcttcccaaatgcatcccagtgtaaagaaccccaggctgccgcacacacgctgatgtctcccctatttgcaaacaagaaccgacctacccttgggcacccactggcacacagctgtaaataacgtaattataatcatcacagggaaacatccataggatcagaaagtatcataattacaggcaattttcactttttggaaattgggctcagatgctgaagaaagattgcaagcaaggcattctcgagtttcaattctggaagagaaagcacattggagcatttggtaggacgaactagctccagggcaaagatactgtggccggcactcactcatccagcaggcatctgttgtacatgcgctcaggcacacaggaccagaccatgtggtctgtgaattcagagagcccacatcttcaaagggaaggctgggtcgtgctttcatcctttcgtgcatttggtgtcttactgagcacctactatgtgccaggctctaggcaaaatggataccacagtgagcaaaacgaacaaaactcctccccttgtggaccccctgtcactgtctctgctgggccccactcagatcttcactatgcagccccacacggttcagcaagtgtccacatgctgtccaagtccgtgcaacttccgaggggtggaaaaagaggcggctccaggtgcgtctgcaaagcctcactacacactactgggacaggctgggcaggtcactggtctctgcctcaatttccttgtgtggaaaatatgaattgccccaccatttcccaatttacaggactggactgccacgaggagaaagaaaaaagtgtatccaccagccaaggaagaaaaacatatgcgactggggaaagatggaagcttctcatccttaatccccaacccagtattgtgccttcatttccttgtctgtgaaagagggtgtgggagcaggcacggtggttcatgcctgtaatcacaacactctgggaggccaaggcaggagaacaacttgaggccaagagtttgagatcagcctggacaacacagtgagacctcatctctacaaaagtaaaaaactagccagacatagtggtgtgttcctatggtcctagctacttgagaggctcaggtgggacgattgctccaacccaggaggtcgaggctgcagtgagctgtgatcactccactgcactccagcagagcaacagagcaagaccctatctctcaaaaaaaaaaaaaaaaaaaaaaagaggggtgggcagggataagggtgtctccatggggggttgttgtgggaagcagtaaagagcccccattgcatgcaattagcttttgtcatcatgactgttcccaaaggcagccatcccttctcccagcatagacaagtgtcatgggagagaggaggctccaagatcgcattgtggacccagctaaatcgatggaaacgtaaagagagcagacctttcccacaggtggtctacaagaggggcaggactgaccacctcgtggggacacccgctcggcttcactgaacgtgatataacacctacggggaatcagggaaaatgtgggcaacctgctgagcccccgcccgccgcaaacactcagcaaacggaatctgttgccatcgattcccagccaccacccgtatgctccctgtgaagccaggctcgggatgaattatgggaagaaataacagggacagagataaaaaaaagccaccaaggcccaccagatggcctcaggccacaggacaggaagccaacgggcatttggcccccagatgctgagtaggggatactggctgtgtctctggcattaactggattgaacacagtggtttgccatctctgcccagctgggtggctttttccagagggatccttgcagatccatgagaggaccccaagcggaaccaaaggcattaagggcctgccactccctctcaggcagcttcagtctcggttctggagtgaggcccagagaaagggactgcgaggaaaaatgccaaggctccttgatgagggctgctctcctctgaccttccaggacatcctggaagttcccagcagccaaaaggaatcctccttgccctctgaaaaggctactcaggaagctgacctggcacatcctgagaaggcagctcaaaaccagaactcatgccctggggctgaggtgtagtggcaaggggtagaagccaggagacgaggaaacaggcatgtagccttcaggagcagcaagaaactccagaggcttctggaagcttccagaagcttccagaagcctctggagccagagtccaaagggatcttcacccttagccagtccctttcctgtgccattgagactgacaattgtggtctggactacactttgggctcagtctcatgggaagaagaacagtcttctctgagacaccaagctgaagggaacatggaatgtgtcacagaaggccaatacatggtgaaaccccatctctactaaaaataaaaaaatcagccaggcatggtggtacatacttgtaatcccagctacttgggaggctgaggcaggagaatcacttgaacttgagaggtggaggttgcagtgagctgggatcgtgccactgcactccagcctgggcaacacagtgagactccatctcaaaaaaaaaaaaaaaaggaatctctttccttcctcttgggcatgtaagacagctcatgggtgagaaattagagagatcttagccacctgttcacaccccagcacacagggaatcacctgggagcttttaaagcacaccaatgacagttcaacccctacggatcaggagttttaaaagcctctgtgattctattgcacagccaaggctgaaaaccagctcaggactcatcaatggacccatctgagccccaggtgagggaatcagcactatgggaatcactgaggcacggccatggctaagatggtgactgctgaaatctaagagcctgggtttgagccccacctctgccactttgtagctgtgtgcttttgggcaagttacttcccacctctgagccaggctccgcacctgtaaaatggggatgatacatcttcataggaacctttccaaggcatgaaacaaagctgaagtgtccagcacagtcataaacagtaagcaccacgcaacaagaagcctcaaccacagggtggagacatgctctggaacgtgaccatggctctctgcccaaacacgctcatgggggctaacggcagggcaaaacccgcccagagtcttgctaccaagtcatgaatccgcacatcataagttgccaccaccccagcatccccaggagaggactgggcaaggagcccttggcccactgcccgagggccgccctgtgagggggctgcatcgttcctcctaccacatccagccccacctaccttctcaggtttatggaccaaaatcatcacggcgtccccagggagcttctcagaaaggcagaaactcagggcccccatcccagggctagtcgagggcaagagcctctgcctgggctgaagggacccaggaaactgagcccaggcctcctctgccaatccatcctgtgtggtggggacaggcagggggcagctccctcttcctcagagtgactcaggctgcagctgatccaaatcttggccctcgagaccacgctgaggtcaccctcctggcagccaaaatcactgagatgaacccagggacattttcatccagctgccaacatcatctcgaccttggtggcggccgactcccttggagcagattctgctgccctggctggccttggcctcccagggaggttctcagaggccagctcccaaagcagaagtgtgtcgcctacatgtggggcagcgctgtggagtggggcaagcctgacacatgctcaaggagagacggggaagactgggatggaagatgccaggtcccagctccacagcagaaacagggcaaacagcacaacccctaccccaaatatcctcaccttcacctggaaccaaagtctgcaccaatggagacaggagcaagtccagctcctggaagccaggccccagctggcctggcctcaggcctggggttcagaaaatgaggataagactccgatcctttcgcagccccctctcaccccagcaaggcctctggagccaaggccactgtccccagacctgcctctgagcccccactcgctccacagcccgccaagggcggctccaacatgtctttccagctgtctggggccgcgctttaagcagagccgcagggctatggaaggcctccagctcggctcattatcggaatttaatctggattccgagagatcaagaggagtcagtggaaagtgactcccacaaggggagagacgctgaggctgacccaaagccggctaatcctcggcacccccggggctttcctggagctcaggcacagctcgtcagatgtcccagccctgcacagctgggcagctggcggcacagagacagaggcagccacatggcggggacagcagggcaggctctgggctcccccgggctgaggtctgcaggaggccttcagctggaagaagctgtgcgggcccaggttggggacatgcaaccaggttggggacatgcaaagaaaaagcctatctctgaacaggcgagctggaggaagcgtgggggatttgaagagcatttgcaagctcagggctttgttcctactggaagattgcagaattaggggaattggctcggtggacctacatgggaaggcagtgccacagccaccacccagggctcttgtcttcctaaagaggtcttgctccacttcctgctgtgatgatgatgatactaacgcaggtgaccatttattgagcacttcctgtgtgtaagacactgttgtaagtatgtcaccccctttcatccacagcacaactctgggagggagattcaattattatccccattttacagagggaaaaactgaggctctgagagatgactctttcccaaggccacatgggtagctggtggcaggatttgaatccatgctcttaatagctggggaattacatcataggggcatcttggttctaggttgaaaaacaaaacaacctgtccagaaaaatgaataaataatatattttttaaatttaaccatttaacttctgaagaatggaggctttgctgcaggaggcacaggaagaacatgtagaaacctaaagaaagcagctccgtcttgccctccactgcttctcaccctattcccttccttgctcaatgctcccacctgccatgtcctctcctctgctggaacgtgagcttccagagggcagggactcgtgtctggttcgttctggtcgatgccctcaggcatggcatgcagcaggtacctgtgctgaggagggactcagtcactcagcagcccagaagcccccaggagcaggaccccagcactagaatgggcacccccagcccaagttgcctgttgccggcagcctggcagggaggacgcctggaacgcccatccctcctccaaacacagtgctcaggcctgctgcccaaccctgcagccctcaggatccaccccatggatctcaggcaagacagcagaggcaccacagaccatgatgggaccaggtgcccacaaagccagcaggaaggaccaagagctgccggagctgagtggagaatccagataacagcctggacacagaggctgtggtttcatcctaagcaagaagctccctggctgctgggagtagatgtcgatgtcacctcccaggagagctgctcagcagtgtctaccaaagccacccatgtgtgggccctctgaccccacaattctatctctagaactttatctgactgatagacatgaacacgtatgtcagcgagggtacttgccctgcggcaccatccatcatagaacagaggagccagcgtgcacacgtgaaacacagcacaacccaagccgtggaacagtgaggtgactcagaggatgagggcaccccgtgtgaacccctggaaagggctgccaaggttcatcatccaacgatgaaagccagaggcaggagtgagtgcactgtggggttccacaggtgaaaacagcaacacagattccttcgctgatttcaggagactcaagaaactggcatcagggaccacctcagcaggggctggaagccttcattttcactgtggttcctcttctttccttttgattttataccatgaacatgtcttgcctactcaaaaacttttttttttttttttttttgagaaagagtctcactctgtcacccaggctggagtgcggtggcaccatctcggctcactgcaaccttctcctcctgggttcaagcaattctcctgcctcagcctcccaagtagctgggattacaggcgcccgccaccatgcctggctaatttttctatttttagtagagacggggtttcaccgtgttggccaggctggtctcaaactcctgacctcaaatgatccacctgccttggccttccaaagtgctgggattacaggcgtgagctaccacacccggcctaaaaacaaattttggaaagaaatatctttcataagcatgggctccagctttgcaaacctgggctcacgtcctaatgtggccacattctctctgggtagcctcattctttggcttcaggtcactttagttctcctcattttacagataagccaccacttctgaaggctactgtgaatatgaaacaagatatcaagtgcaaaacactctggaaacgctcaagaacagttttgttttcttggtacttagatgaccatccccacccccaccccccaccagcaccaaatagcagtgcttggcaaacgtagctgtgatggttcttctgtccctgtctatggtaacaagtcccctttctagctgaagatgctaagcctgcacatcacaaggaggtgcccacaccacctttcttccatcaatttccctgcccagtggggacggtagatgtctgacagcctgcggggtccagcaacccagccactgagtaataggaccttggtcatttctgcctcgggactgtctgaatagaatgcacctgctaaatgtcccagccctttttcttagcctccttacctctcacaagaccttgaaattaatggatctcgataaattaaagactttcaacacaaacgtttggtttctgacctagtgattcttggaaggctaagagttctctgttttttttggtttgggtttttttcttcccctaacattttattttagatggccaccttaattggttgcctgacatcgtgcactgggtttcagagtgagaaacgggagagaggtagcccttcaaaaatgtttcttccccttccccttttcttctatgtcccttagcacccagccagatctagactgcctataaaaacccacaaggcaccacgcatccctgggctccctggccttctactattcctgaatttgttgtcggtcatggttttaaggaagtgacatacaccatacaccttctttagaagggataatctggtacagggcctggcacgtggttgtgccaatctgacccatcctctggccctcaccaccttcttcctctgcccccagaggaaactcagcacctctcccagatacccgtatagcacccacctgcccaagtgctcctggagcacctgataaacgctgatccggaacgtctcattgtcgaagcgttcccggatgtagtccttgtagatccggaattcggctgccgtgacagcttccccttctgggatcttggaaagatcaaaccggaactctcgatggtggtagcgtgggtggaagaattccttgtcatgttccactggaagaggaagagaacacacaccaacaccgacagctcattagtgtctgggtttcactctctggctctgagtccaagcatcttgcctaagctagatggaggcatgcccattgccagtgaccccagtgacaactgctccttcctcaccaacacactgtagactggagggtcacaggctcagaccccatggtccccatggtcatcctgaacgacaagagcatgattctgcatccaacctgctgggaaaagtagggcactaaccacagccatccaagaggtcctggccagactcaggtcccaggggctcaggcctgggttggaatctggcctcagccactaaccaacagagtggccctagataaggtaacagaaaacctctatggaacccaatttcatcatctaaaaaatggggattgtaatcctccttcatgggttatggtcagggttgaatgatctcattcacacaaatagtttaacatctgctagggttggataactgttagctattgttggtaagcataaaccttactgtgcctagtatgagacatctctaggaccaggggttctcagccctgaatgcacatgaaaatcactgtggaaacttttagaaaatactgatgtcctggcccaagtctgggatggtaaacatttaacaattggctctcagggacctgatctgaagcgcctgctgactacaccgtgtaaatactgccatcttggcagatttcaagctaccaacgtgaggctgctggacatgggaagagaagcacacagtaggctccagcacacagctactccgaccccctcctgaaccaagggaatccatatctctttaaagcacccccagatatttctaatgaggtgccaaggtttacagtcacagcagtagactaacagcactaaaaggagtgaatggcagagttggggtggaggttgaacgtgactcaggacaaaataaggcaaaaggcctccacctttctcccttctcctggcagcggtattagactaagatgtcatgtccatttcatagatgataagcaccaagatgaaagcccaggaatggtgtttctgggtggggacctgtggctcctgtggatcatgccccctctggaccaacatggagcaggaatgacaatgggagccacagagtgctggaaggggcagaatgaccacactcaggccagtgagaagaacctccagacacctttcatctgcaggaaaatacaagcccatctccacttcctgtctgggggtggggaactggagagagagggagaaagagcagaaccagtttggccagcagattggtcagaagaaaggagaaatacgatcagcaatcttcagctctcaggctgggttatggctgcccggttccaagtgggacagcaggacgggaacaccattgaggaagaagttcacagcactggcagccccaagaccctggctgcgcagctccattaaaaacaatctggtttaaaccttaacaacagtccaaaaagagagcagggtgagggcaggaagcatgggggaattacccgctcaggctgttccctctcaggaagaaggggcagatgaagtccctgaggctggggtctctggctgggcacaggagcatccctgtctttggagagacctcgggaagatgacctttgaaccacagctgctagaatcctgggccatatatggagagctggcgggagggaaggactctccagaaaccgttccggggtccttccagatgacagctctgcttgtcacaacacgcccctcacgcccacaaggaacccttctctcctgacccaatctatgggacaggccagatgaatgggagagaaggccatggggatgtcaccaatctgctttgatttacagagaaggtaggagtctccgtaaagggcagccacttgggaaccaagtgagcctcgggaggtgaccccaggtgggaaggcggggcaaagggcctgactgtgtcaccgtgggactgcccccggccagtcctctgtcacctttccagctcagtcaaccctcatgccagccccaaaaggtgagcagcccgaggaagtgagtacaatcccgcataggtaggtgaggcatgcacctgagacccaggaggtgtccagtgacctccccagggccaaagacctgggattcaagcccaggtcctgcccaaaccagaggcctgaaccaccatgcatctctgtggctgcgtgaacagctgaagagctcaacaagggccgttcctctgcttgtttgtagaacttttttttttttttgagacagagtctcgctctgtcacccaggctggagtgcagtggcgcgatctcggcttactacaagctccgcctcccaggcccacaccattctcctgcctcagcctcccaagtggctgggactacaggctcccgtcaccatgctcggctaattttttgtatttttagtagagatgggattttcaccatgttagccaggatggtctcaatctcctgacctcgtgatccacctgcctcggcctcacaaagtgctgggattacaggcgtgagccaccacgcctggccgtttgccagaactttttaactgcactgttgtatacgtgtagcgtgtgtgtaaaccaaagtaaacccagtcacggagattcctccaggtcaagagacagaacattaccaaccccctttcccaccctggacttctcaaactataggttagcttcgcctgtttttgaacagtcgctgcagggcctcatacactatatcatctttcgtatctggcttcttccatttcacagtgcttgtgtaattcatccacgtcaccgtgcatgttcattcatcctcattgtcatatgatagtccatcgttgtattagaccgcaatccatgtatccattctacagttcataggcgttcagggagtttccagattggggctctgaaagcagtgctgctatgaacatcacaggacacgtgtttcatgcctagaagtggcattgtgcattgcagctttaatcaccctggaagctgttctcccaaagcattgcatctgagaggttttcatgagtatgctaggagagaggtggaagagaccaggtctgccccctgaaggaggtggcacagtcttgggacaactcatggcttctcgagtgcttttctccaggggaccaggagcggtgaagcacagatgaagtcctgttccaaccatctctgttctccactgcagcacagccagacctccaaagaccaggaagagcccttgagtcgtgccatgattcaactttcagcagagagggttgctcccacaatcatgcacaggtgcaaagtccaatgccttgaacacagtggctccccgcaaacctcagttccctgctcccagtgctggatgaacccagcttcagagcagccccactggcagatacgcaatcagcctgagcagagaaaggggctggggaacatctgaggatgtacaactaaggatggctgaagagcccggaagtacaaagcacatgtttgctgagtgctaactctgtgagtcctgcactgagcaagcactctttgccatcatctgatggaaccccatgagacaggactgatccccattttacagatgaggacactgaggctcagggaggccgggtaactttcaaaggtcacaaatcaggtgagcggctgaactccaaagctcaccctcttgaccttcacactctctagagccaggtggcctgagtttgatcttggctgtgccacttaccagctgtgtgaccttccccaatctacttaatccctgtgtgttcccctccccctggagatagtaacaatggccctttctcatggagttgttgggaagattacagaagccatttgctgacaggagaaagccacaggtgagccatttgagtctgccattgttacagggcctctaaaacaatgagccagaagaatgacaatcaatgcagaagaagcaacatgtgctgtgggcatttacacagtgcacttatgattacatttgaaaaaaaaagtgcaatagaccgaacaataaagatacgtttgaataagcatgacataaacacaggtacaatcattagagtcatgcccaatgaagaaagaaaacactgacacataatcacaaacacaaggtttgttacaacagctgcaggtacaactgtttttaatatagaagatgaactgtatcttaactgttaaggtatcagagttacaaggttcttttctaaaaagaaactcagggataaagtgaggaactaaatttcttgcaaacatttgtgggctctttggtatggctttctgagaggatttccttcattaattagttggagactatgagaagcaggaacgacaatgttactctattctccctgaaacccacattgtcacatgttctgaaaataattttgtatccattatcaaagaaagaacagtcatgaagtacacacacacacacacacacacacacacacacacacacacacacacaaataagcagtggataattcaaagtccaaaccaacttccaaatctcatctttccaaggtttcccttttctatggaagccactccacagtgtgaaatctacaccatttcaactcaagtatcaagataattgaattgttaccactacaagaggtagaagcttgcatgtatttttcaggtgaaaatatgtctttatactttcttctaaagttactgtatatagttgattacccaagacttgagttttaaactaaatgtctagagttgacatctccccatgcccacagagaaaagcttcctaaggaagcccagagcctaggattccagcttttcctccctctacctccagttacatcccagcaccccaagggctgagagagcttacaggcattaacaaaggactttcatcttcaaaaaattaaaagggcctaaatccccaagaccaaaagataagtccaaagaaaatggattccagaaaacaccatcctgacagcaagcagacccatcactgtcccaaagacaagtccagtgtcttccttttacaaaaacccgaaatagccccaaaaccagccctaagaggggaaattctgggctggaaggtgtcaataatgggttagaggccaggtaggaacaagaagctgcccacctgggcgcccccccttcatgatcctctgccatgccagggaagacttctgtcccagatgggagtcacacctgcccccggcatcactcaggagtaccttgcctctccctaacatctggggttcttcctcccacctacagttatgagacatactcaggcaaacccctcactaagttatagttgtctgatacaaagggagggccacaaccaaagaaattggcaacccactctgtagacttgcaaagggcagctggtgcttaaacagaacctgcagtattcagagccgtgggacagtatttaacaccctaaaaattaggggtatgaacccaaatatatgcatatgtacagtcgtacatcataatgcacaaaactaaacgaacacaatacattgttacaaacacgagaaaacagatacagaagatatatttctcctgcttcctgagggatgattttgtgctgggcatagctcatcaggatgagcaaagttggggcatggctcattacaatgcacaactgttaaggagccttgcccatgtccccccacccccactcccatccctcgtgtatctgtctctcttggagagtccatcatcactgtcccagttgagccatgggactccaagggagccaccatcttgttccatgaccctcttctccccagttgagggatgggaggaagccagccttaaccttggccacacataggccttcttttatttttattggaacctggtatgaaagagcccctgttcgctctccccgccttgatctctaaggatgtaatccagtgctctgggaagccccttgccagcaccttgcagggaaggctggtctgtgagaaagaagcttccaagcacggaggactgaggttggaattgaggagagagacctgctgggttgatcccctggtctggtagtccctgcccttcctgaagtttggggtttcagctcttccaatctatgagttacgttgagatgcttcaaagaagtcccctttaagctaactctagtcagactgctgcctgactgcaaccaaggcagttctgagcaaaacacacacaagcccaattgtatacacacccagaagtggaaatggatgggcaggaaacactcccagtagctgtgttctctccagatgaccattcaccatgaaaaccgctttcttcagacttggatcattcccaaatgtaaggcatcccccttgactgagctctgtaagaacagggcccatgactgtctcagctctggatcgcatgccctccacagcctgatgcttagcagggcctcataaatcttctgcattgaacacattactcttcacgcaattcctttctagtttaagtaaactactttgttgataacgtacacacagtaaggcacacagacaagcattcacgaagtgtgatgaatttccacaacgtgaatgcacctagggcaggacacaaaacatttattaccagctccgaagtcgtcccgacaggggtccctcccaaacaccagtccctcctcccctaaggctgactgccttcctaacacccaataccacggactggctctgcctccatgagacctgactatggaatcacagatgtgttctcttctgtgtctgcagccttccacagcctcactcatgtggttctgtgtaccagtggtccatgcattcccactgctgtctagaaccctatcgtatgaataggacacaactcatttttttatagtcatttggggagtttccagtttgagccattggagagtttacagtttgagacaagctgtgctgcaatgcatactcttgtgcatggcttttggtgaacacgtgtccactgggtaaatgtcttgaagcaggatttctgggtcagagggtaggcacgttcaactttagttccacatctgactgtttccatgtcaacaattttggggaaacagggtatgaggccaaaggagacacagtccctaaagagatcattcatttttgttgactttggcaaatcccagtgcctgcgttcaggtacgaggcagctctgcaggtgagggttcttccaggagaggtgctgaatggactcttaaggaagaacggaggcccactagtcccagaggacaaggaagggcactgtaggcagaggcaacagcatgatcgagggctcgacagacaagaaacagggcatgctggggagtttaggtaagaagtttgctgagaacgacaagaaaaaagcaacaaattcctcattgggaaaatgcttgaatgtcaagctaaggggttgatcattgatgtcatcaaccatgatggcttggtcccttgttagacacaaagcagtgccctgaccagatctattttagatagaggactggtgaccctgtggaaagtggattatagggagtgaggacagaggcagggagtgaggacagaggcagggagtgaggacagaggcagggagctcagaggaggctctgatcagagatgatgcatacccagtacatgcaccctcctcctccctcctggcacccgaggtaggcatcactaaacaatggcaacactcctttcttaattctggcacccaggcagccactatcaatcttgactggctcaagagaaaagatgtcagcattttccatctcttgtcaggaccccagaagtgtaatggaccagaagtgcttctctaggggaaggaacaagacaattgattaaaagcaagcatatgaagagggggaactagaggatgctgcccactgccggcctggaatgccaggagggcgataacaccatcagtagatatcaacacaggagagagcgctcaggaggtgaagtggtagggaagaaacacgtgtggctgcagacaggtgaaacttgagatgacctgcagaatgttcaactggacagttggaaaaagaggtttagataaccctggcaagaatgctcaagctgggagctgttgaattgggtttatggataaagttatgcacgaaaaatgcatttatgatgagaaagactagcatggccttggatcaatatttggggctacctgggagggggagaacgatgccaccagaaggacttggtccaaaggaagggaaggaccagaggactggcagggcaagatggcgcaacagtggccagattcagagaaagggggcagggagacccctcttccagggaccattcactggatttggtcactggttgctcagagacctcaggaagcagctctcatggggacagccatgcataaaaaaaaaaaaaacacctgacgagcaagactgtggccagttgcacatgaaagatatttgtatccatgaaaaggggaaccgtcagcccaggcaaagccgccttcatttcctcctgaagacgttctcccagccagggctggaaagagttgataaatggatagtaaataatcacccagcagctccttccaaaactttatggtcttcagaaaaaatttggttaaccttccagactatgcggccctctcactgcccccaaagatgccgctaaactatgaggcaggaacaaatattttatgagcaaagggatgctttccaggcaaaaaccacaagtccagcattagaattccatgttcctcactcagagtctggtttctgtgagcacagactagtccaaagcattcttcagctccagttaggggccggggacagacccccacaccccactttaatgaggatgaagctcaaggggctaaaagaactaatcgaagtccacattataaccagaagtcagaactgggttttcacagacccgaggactgctcagggccccatatcccggaacgtccccggtacccatttaactctgaaactaccaaccctggctcgctctttccctggagggctacagctcatctggaaggttctggcacacaccagaactcactggagctgacttatcccggctgctgttaggaggcagtttacgacccacagtttcagggatgtgaaatttgatgatggctcttcattcattcattcaaagatttacatggcaagattaaggagcttgaaaaagccgccagaggcatgcaataaattgggaattctggaaagtggaacagacatacctgactactctaacaggaaaatgttctcttaataacatgagcagcctggagaggccacactgacacacacagctcttgggagaagggaggagaatgctctatgcccagagaaacagaacatcgcctagaagttgacaatgatacacattgttcagataacacctccactgtactcattcaacaaggactttctggctgccccagcatggacgtgagagccgtcagttgtactgtagaagagtagttcatagaagctcacttagattgcagccctgacaacctatggaacacctaagccaggtaaacagccaccattttttaaaacttttatttttaattgtggtaaaatacacagaatatacaatttaacatcctaaccacttttacgtgtacagttcagtcattttaaacacacgggataccattcttgcacatccagtctccaggacttttttcatcttgcaacgccaaaactctgtccccattaaacactaactcccctttcttcctccctcctccagctccaggcacccacccttctactttctgtctctatgaatctgactgctttgggcaacacctataaatggaatcacacagtatttgtccttttgtgaccggcttatttcacttaacaaaatgtcttcaagtttcatccgtgctgtagcctgtcagaatgtccttcctttttaaggctgaataatattccactgtatggatgggccacattttgtttattcatccctgaatggtatgcagcttccacatttttgtgattgcgagtaatgctgctgtgactatgggtgtgcaaatatctcttggagatcctgctttcaaatctttcagggacatacccagaaatgaaatcgctgtgtcacattgtagctctattttcaatatttttgaggaagcaccattctgttttccatagtggctacagcattttaccttcccgccggcagtcgggaagggttccaatttctccacatgtccaccaccattgtgattttctgttctgttttgttttgtttgatggtgactgtattagtctgttttcatgctgctgacaaagacatacccgagaccaggaaaaaaaaaaagaggttaaattggacttgcagctccacatggctggggaggcctcagaatcatggcgggaggcaaaaggcacttcttacatggcagcagcaagagaaaatggggaagaagcaaagctgaaacccctgataaacccatcagatcttgtgagattcactatcatgagaatagcacaggaaagacctacccccatgattcaattacctcccccgagtccctcccacaacacatgggcattctgggagatacaattcaagttgagatttggtggggacacagccaaacccatttcacccctggcccctccaaatctcatatcctcacatttcaaagccacctatgccttcccaatagtcccccaaattcttaactcatttcagcattaactcaaaagtccacagtccaaagtctcatctgagacaaagcaagtcccttctgcctatgagcctctaaaaccaaaagcaagctagttacttcctagatacaatggaggtacaggtatcaggtaaatacggccattccaaatgggagaaattggccaaaataaaggggttacagggcccatgcaagttcgaaattcagcagggctctcaaactttaaagctccaaaatgatctcctttgactccaggtctcacatccaggccacactgatgcaagaggtggcttcccatggtcttaggcagctccacccctgtggctttgcagggtacggcctccctcccagctgctttcatgggctggcattgaacgttgagtgaccatggcttttccaggcacacggttcaagctgttggatctaccattctggggtctggaggacagtggccctcttctcacagctccactatgctgcaccccactagggactctgtgtgggagtcccaattccacatttcccttccccactgccctagcggaggttctccatgagggacccactcctgcagcaaacttttgcctgggcatccaggcatttccatacattttctgaaatctaggtgcagattcccaaacctcaattcttgacttctgtgcacccacaggctcaacaccacatggaagctgccaaggcttggggcttctaccctctgaaatcacagcccaagctgtacattgacccctttcagccatggcttgagtggctgggacacaggccaccaagtccctagggtgcacacagcagggggacccagagactggcccatgaaaccactttttcctcctgggcctccaggcctgtgatgggaggggctgccatgaaggtctctgacatggcctggagacattctccccatggtcttgaggattaacattaggcttcttgctacttatgcaaatttctgtagccagcttgaatttctccccagaaaatggattcttcttttctatcgcatagccaggctgcaaattttctgaacttttatgctttgtttcccttttaaaagtgaatgcctttaacacacccaaggcacctcttgaatgctttgctgcttagaaatttcttccaccagataccctaaatcagctctctcaaattcaaagttccacaaatctctagggtggggaaaaaatgccgtcaggctctttgctaaaacataacaagagtcacctttgctccagttcccaacaagttccttatctctatctgagaccacttcagcctggattttattgtccatatcactatcagcgttttgggcaaagccattcaacaagtctctgggcaattccaaacttttccacattttcctatcttcttctgagtcttccaaactgttccaatctctacctgttagccagttccaaagtcacttccacatttttgggtattttctcagcaatgccccactttactggtaccaattaatgtattagtccattttcatgctgctgaaaaagacatacccgagactgggaagaaaaaggtttaattggacttacagttccacatggctggagaggcctcagaatcatggcaagaggtgaaaggcacttcttacatgacagcagcaagagaaaatgaggaagatgcaaaagtggaaacccctgatcaaaccatcagatcttgtgagaattagtcattatcaccaaaacagcatgggaaagactggactccatgattcaattacctccccctgggtgcctcccacaacacgtgggaattctgggagatacaattcaagttgagatttggtagggacacagccaaaccatatcagtgaccatcctgatggctgtgaggtgggcagccagcattttagaagccctcccactggcctggctgccacttcacatgtatatatcatctcactgaatccttatgaaaacccctctcagaggcagggggacacatcgtgctcactttccagatgaggacactgaggctcagactgactcttgcccagggtcacacagctgatctgaatctttaaaggcccgtactcttccccactcagccataccaactctcttcctcacatgggagctgccagtgacctcttagctgtggcaacgattcaataaggacagctctgagctgaaccatgctctgctcttggcacactcgatgcactcgccacataaatctccaaagctaaactcaaagtgaaggttctgcatccgactcagctccctctcagacttgtaaattttgctcctgcctaatgccagtccttgagggagggaggctgacagcctgaaggttttgtagcattcacccatctcctcattacccctccccaggcccccagattggggggcagggccctgcctggcaaagggcacacaggcagcattgtctcccctgttcctgaactgcttcaactctcgaactttccaccaaatgcttcagctgccagcaataccacctggagtcctacccgcctggctctccaagagggtctttggagacactgcctccttgttaggtgctggggggctgcgtccagagacatgagacctggaggcgagaccacaggcaggcatctccttggccatcctcttgtcatgagccctgagcctgcagcctgcacagatgttggggtaggggccagagggaatgattgtaccacaagattaaacacttcaatgtcaacatgtgtgcagtgttgcttgaacaatgttatcattgtgaattgaatgaaccaaagggtttaggggatggggcagggagagggaaaaaagatgggtttaattatctctagagctgaggccagttctttgcctaaaaagacccagatgcccgtagagctgaaaagaaaaatgggccgcaagcacatgttgctctttctactatagacccagacagccccctggcctacggcttcccacctcccagagggaggaacgcagtctccagggatgtctgggttccaaccccatcctcagctcattgaaattgagggaaaagaaccagtgattctcagccagagctgactttgtcctcccctcactcccatgaaggcaccctgggcattgtctggagtcatttttggttgtcataacttaggagggggtgctcctggcatgtactgggtacagaccagggacaccgctaaacatttcacaatgctcaggatggtcccccatccaaccccaaatgtgactagtgctgagttgagagtccttgatctggaccgacagacaggcagagctcaagagggtcaagaaacctggggtttggcctcatctgagctgtgagctggctggtataaccccaggctcactgggcctcagtttcctcccataacaaaggaaaggactgaatttctctgaagtcccttttctcgcctattagactgtaccatgtaaaaagctgctgatactctaccagttttgacctgtatggggttcaccctaacacctcggggcagcttggaggctctatctgtgctgtctggtaaagcacactgagacacgtggggctactgagcacttgaaatgtggcttccgtgactgagatctgaatgtttaattgtatttcattgtaattaatttaaatgtaaacagctgccaggcacagtggctcatgcctgtaatcccagcactttgggagggcaaggtgggtggatcacttgaggtcaggagtttgagaccagcctggccaatatgctgaaacatcgtctctactaaaaatacaaaaattagccaggcatggtggcacgtgcctgtaatcccagatactcgggaggctgaggcacaagaatcacttgaacccaggaggcggaggttgcagtgagccaagatggtgccactgctctccagcctgggcaacagagcaaaaattccatctcaaaaaataaaataaaatctaaacagctgtatgtggctcatggccttcctagtggacagcccagatcacaggtgtccccatcattgaagaggtgctgtcgcccacactgctttgtagcaccaagggtttgcagggggccactgcaaatgagggtccccgactatgttctcagagatgtaggagaaagtttttctttaaaactgtgggattggtggctcacgcccataatcccagcactttgggaggtcgaggcaggtgtatcacttgagtccgggagaccagcctggctaatatgccaaaaccctgtctctactaaaaatacaaaaattagctaggcgtggtggtgcattcctgttctcccagctactcaggaggctgaggcacaagaatcgcttgaacccaggaggcagaggttgcagtgagctgagatcgtaccactgcactcctgggtgacacagcaagactctgccctaaaaaaaaaataattaaaaaaattaatgaaatggcgttcccagtgtgagaaattcaggaatttaactcctgacttacgggtttgaggcctgggatgggggctgttgaacaggtacaaggatcctcactctgctcatggggtcacctagggagcaaacactccccaccaagcacctggcgagtggtatcctgctggtaattgttagacgtgccaagttcacgaccgcagaggctttgctccaggcctgcccgggcaccgcagcccctccccacggctgagttggtctcacccccactgacactctccctgggcctccttccctctcagcccctttcatttccctcccatagcctaactactgggattattttggtgagagacctgctgacctgtttctccactgtcctctcttctagattttaactccaggaaagtaagaactgagcaaaggagcaggactcaggaggtttccagagcagagccgggcgagagggcgagtctcggctctgccacttgctggggcgcgtcactcctcttctgtgaaatgcaggtgtagtaatagcactgactccactgggctgccagttaaagcccaggagtaaagtagaccaggcatgctccaccttcaggatgcccagagtcacacgcgagcttattacagcacaggccactgggccccacttccagcatgtctaaggtgggtgatctagggtgggcccaagagcatgaatgtctaacacatgcccaggtgatggtgataatgcaggtctagaaaccccactttgagaaccagaggaaaggagagtgtccatggagtgcctggcacatgtaatagtcttggaagctattcgctctgattgctctgttgcttagcactgttcacacaccacctcccacgctcacttgctgggcactcagcagcttctccggagacttagtgaagtgggttttgaaactctccccgtgagcaaatcaggaggaagacaccggctccttagccttactcagcccaggatgcaggagagaactggggttgagcgtgggccatggggcctggaggtctggttcacacgcaggctctgccaatcaccagcagtgacccaggacaagttaacccacctctggaaggctcaactttttctctctataaaatggggacaggcagaggcccccagttctggggctgttgggagaattcaaggacatggaggctggccaccagggagggcagcagagacctgtgccttgcctgctcccagccaggccagagcaggccccaagagcagccaggtgggggaagtgaagctgccgtcctccctcccttccccaggacaggaggagcctgctcagaccttccccccagagcagccagagaggcttgggtcagctgggcagacacagctggtttaaggtattttagaggcaaatcaaatcaaatgagaatttataatccttcctgaggcctgggttccatcagcctaaactcattaggcccaggagatgcaggtgcagtgaaggaaaagatggttctgcctttcctccatgcccagcccctgtctccctttcaaaataagagtcttctttaaagccacactctgtccctggaccacagtaatcagcttcatttctgaaaacaggaaggtgcagagacgtacaaaagccgccccaggggctgatggggcagatttggtgggaactggaaatcttgaagagcctcactcatttcaagttcacattgtaagaactcaaacttaaatccctaagctaaacgatcaaaacacccttcaaattgcatggttgtcctttaaacctctttccggtgtgggaagcaggagaatatgagatcaaaacaaaaaagtggtgtttttttttaatttttattttttatagagatagggtctcactctgtcactcccaactggagtgcagtgatgtaattacagctcactgaagccttggactcctgagctcaagtgatcctcctgcctcagcctcccaaagtgctggaattacaggcatgaggcaccctacggggcccagagaatggtttttaaattacattttgtatcctatatgaaatgtaactggaagagttgcaaacagactccaaaaagttctacttggggtcttctttccaaatcattgctcctgtgattagtgatttttttttttttttttttttgagacagagtcttgctctgtcacccaggctggagtgcagtggcgtgatctcggttcactgcaacctccgcctcctgggttcacgccattctcctgcctcagcctcccgagtatctgcgattacaggcgcccgccaccacgcccagctgattttttgtatttttagtggagatggggtttcaccgtgttagccaggatggtctcgatctcctgacctcatgatctgcccgcctcagcctcccaaagtgctgggattacaggcgtcagccagcatgcccggccatggttagtgatttaacagtattattgtacaattaaatttatataaagtttagaaacaggcaaggttaatttatgctattagaaaacaggacaatagttaccgctgggtacaagtacgagggggttctggtcgcttctgcttcttgatctacacactggttaccctgtgtgattgccttgtaaacactcacaagtgctcttgatttctgtgctgttctgcacacgttacacctcaataagcagtttcattaaaactcaattagcagttttattcataataagtgttgttagctttacccattgccaggtctactcaacacacgcttgtcaccatactaagaggcacaatcaattcaacagaagctctttgggaaaatataccaatatcttaatcaatttaaatacatcctggttttcagaaactttgataagcaaagatacagggcattaggcctgacacacataactgtaaaacccctatgtgtcttcctcctgccctcatgtgagactctccaattagcaatgctgttgactggcctgctccaaacctatccttcaggcttgagaagcagttcaggatcaagtgtaagagggaagtctccaggaactggatctccaaatccaatgatgcttaactgggtatgtggtcttgggccaactaccgctctctgctcatttatctgctctgtaaaataggggtgataataactgccccacctgaaatggctgtcatgaaaattaaatatgttaatattaactaaagaggacaggctgggtgcggtggctcatgcctgtaatcccagcactttgggaggccgaggtgggcggatcacctgaggttgggagttcaagaccagcctggtcaacacggtgaaactccatccctactaaaagtacaaaaattagccgggcatggtggcacgtgcctgtactcccagctactcaggaggctgaggcaggagaatcacttgaacccagaaggcagaagttgcagtgagccaagattgtaccactgcattccagcctgggtgacagagcgagactccatctcaaaaaaaaaccaaaagaggacaaagggtgcttggcacatagtaagcctttgacaaatgttcactactgggatgattattacaatggctaacatagctgtaatcagatagtagacacacctccacaccccagcccaggcacaaagggccagaggctgactccagcaactgtgttgatgcagcctggtctaccctctagacccaactgattcatgagtgaacatgtgattcaaactgcttaagagcctccccccaacaattgtagttgaatgtagtagttcaaacatatgactaagaaccccaatttcttctgtcttctttgctccatcattgtctgcatgttgacttaattcttaggcctcttgtcccacagtcacaagatggctgctgtggttccaagcaacatgtcttcacaaaaccacattcaaggcaagacaatggggacgagaacagagagttccgtttgctcagcagccatttaatagaaagcaaaatatttttcagaaccacctctcagcttctcccctaatcatctcctccaaccaacgggcttaaggaggcacccagaccctatcacgttagtctcccacgggaataagcagaaggcatataggtgcccagaaccctttactagaaaacatttgatcaggctcccagtgtaagcatgaggttccaccattccaccagggcaggcaggcgtttctttcaagcagctctccacccttggctaacaaacactgacacagattcttaaaatgctttgagtctcttgctctgttcatcctccactcaggggaaacaggagccgcctgtcccacaagcagaactcaaaccaagctccaccccagcctctgcttcctcccaggggacaataattcctgacctcctcgggtcattttcaagaaattttgcccctatctcaggagatcaggagggttatgttaataaaacaaagcttgttttcagcaaacaactggctgttggctagagttctatatagtcctcaaagttagagctaatgtacctacctgtaggtaggtttgagtttaaagaataactaaaatctttctatgagctacagagggtctggttaaattaatgtcaatgtgcaaccaaccttctgtatatattcacagtggaacactatcatctggaggctttggaagcttgcttagggcctctatttatatgtgcatacagtggaaccacatcacatgtacaaataacttttgtaaatctaactgtatacaacacaggaaacaacgacaaagagggagagagaaaccatttcaatcatttgaatgtggccacccaacaaccactgccaacccacttttccctcccctgcctcccactgtgctggccagatgccagctgcatacattcacaccctccctcgaagtaacaagacaggggcttacacacagtttagcccaagagacaaggagaagtcttccaaggaacttctaggaaaccaagaggtaggcaggcaggcaaggagagctctttgtgccattccccatcctcctgccttgaatgtgagattgcatgaggatgaactggctggggcggcagcagccattttgtaagcatgaggtaagagacatgaggaatttgaggatggtggtagggggaggtgggaagctcatggatgcttggacagtatcactgagctgcccctgcaaacgtgaactcatctccctgaagacttgctattaggggagataatgacatgtttttgtgctgaagccatgctaggcaggtgttctgtgaactgcagctgaatgagttttttgtttttgttttgttttgttttgttttgttttttttgagacagagtctcactctgtcccccaggctggagtgcagtggtgtgatctcggctcactgcaagctccgcctcctgggttcacgccattctcctgcctcagcctcctgagtagctgggactacaggtgcccaccaccacgcccagctaatttttttttgtatttttagtagagacgatgtttcaccgtgttagctagcatggtcttgatctcctgatgtcatgatctgcccgcctcggcctcccaaagtgctaggattacaggcatgagccaccacgcccggctgactgctgaacgagttctaaatgaaacaccattcctctccacagaagcaggtagtggccattaggatgtgtatctcttatagtatctgctgtcccagagggtgttataggtccttaagtgtaagtataacacccagagggtccttaagtgtaggacctgtatcataccaaacttcttaccttctagtgtttgaaggcaagtgttttggtatgatacaggtcctacactcaagcagattatttcatcccatgtgcaacggaagaagcagtgatctgctgcaacactgggagagaaactgggagaaggaactcagccatatggagatactgcataacgaaacagcttcccatggaaattcaaaggtaattcccactctacccaatgtctgtcctacctgctgtctttagcctacccctgatgcaggggtgactgcatcgcactttttcaaatgtcccggattcttttcaaaatctatgatgggagttgagtaaataagatacatataatgtttgaaatgtgaaggtactcagggaagtgtatagtcttggatatgagggctgtatttagtcacaaacttccaggcatctccaatgaattacagctgctgaactaaaacatcatcaggccattgtcatgttctccattgatattggtctactgtcatgttcacggatgagcctagaagaggctctgcagcgagactggacccccaaggcagccaggagcagccctgtttactgagagttccctgcaggtgaggactgagccccttcctgccatgatctcactcaatcctagtgtcctgagccttgagccacccaccagagagggaaactgaggcccagagcactccaaccccttcagtaacttgcctgaggacacacaccagtgacctggacccaaagacagacagacttgccatccccaaagctcggcgagtaatttgtcattcctgaccctattttcacatacataaaaataaatgttgaaatcatgctatttaatgaacatctggcatgggctggtcctcacttaaaatgaagaaatgggccaggtgcagtaactcacacctataatcccagcactttgggaggctgaggcaggaggactgcttgagcccaggagttcaagaccagtctaggcaacatggtgaaacccaatttctacaaaaatatatatagagtatatttttattaaatatattattttaatataaatatatttatataatatataatatatatctatattaaatatagatatatatacacacacaaaaaattagccaggcatggtgatacatgcctgtagttccagctgctcaggaggctgaggtgggagggtcacttgagcccaggtggtagaggctgcagtgagccaagatggtaccactacactccagcctggatgacagaacctgtcaccctgactctgactcaaaaaaaaaaaaaaaaaggagaaattcatttgcccatatcaaaaagtgagggaaacacagaaatgccaccccactaagtctgacatgaatggtgttcaaagaaataaaagaaaaatatataactttactgtgaaagttttattgatgtgctttttttggagtaggccagcccacagtcaactgtctaaacccagcaggttgcctgtgcccccagccggcaagggtgggcagatctgggtgtctccttaaaactctgcaccaataaacacagatcttaatcagcaggaggcaattttctagtataacaggattcgtcaaaatacacccagtttcctgttttgcctgtgtccagtcgacaccgacaagcctcccatttcagctgaggtatcatcgcaaagagaaggccagctgccctgatccaagtcctgtggagacacggcttgggggccaccgtgcccactgcctgctctggaccccagcacaaaccagcagcacatcccaccacggtgggtaacagagcagctgagctcagggcacaggcaggtcccgtgcacggtgggttcctgattggctatggtgtagcaaatgacagcatcactgcctaccactgacatccccaggcaccagctgcaggcggcccgaggtcagccctcttcctgtctccccacatgggatcttcacagcagcccaggagacaggcacccacattaaccccagagtaggaaacaggagacccagggtttaacaacctgcctgagtcggggaggtgggggcagagcggtgggggctctgcagtctgacggtctgactcagacccaaactcttaactaccatctgagacattttagaattttttcaaaaacacaggagaacagggtgctgggaccaagcaaacgcaggaaaagcctccctgtgttcgacatcacccttgtggggactcagagcacatgcctcatgttaaagatgcagaggagtcttccgaggggacatcctttaacctacagctttcgcagactcagaggagctccagtgaacatggagggggggcaggaagtgtggctgagtcactgtctgcagaaggacaaaagggacagataaaaaactcaggcttttggccgggcacagtggctcacgcctgtaatcccagtactttgggaggccgaggcaggcagatcccttgaggtcaggactttgagtccagcctggccaacatgttgaaaccctgtctccactaaaaatacaaaaattatctgggcgtggtgatgcacgcctgtaatcccagctactcgggaggctgaggcaggagaattgcttgaacccgggaggcagaggttgcagtgagccgggatcgcgccaccgcactccagcctgggtgacagagcaaggctctgtctcaaaaaaacaaagcaaaacaaaacaaaactcaggcttttttactttttgcactttcccaggtaggggacatagcgtgtggaaagcagggatcaataaaccccatgaagagccagacagaaactattgtaggcctcggtcaccatcgtgtctgtggcaactgctcaaccctgtcgcagcggcagtaaagcagtcagagtgaatgcgtaagtggatagatgtgttccaataaaactttatttacagaccttgaaatttgaatttcatgtcattttagtgtcatgaaatatgattcttctcgagtatttatcacacttttaaaaaatgtaccagccattcttagcctgcaggctgtactaaaacaggttgtgggctggagttggcccgcgggctggggtctgaagcaagcaggtctccctgctccaagcagcatttaagctacagggagacacgggaaaatatagcttctgtgctcaccttccctctcccaccccagagtaagttacctgccaagagaggggaacaaggtaagagagagatctgccctattcttcctgaggaacgtccgaagataaaaataaaagaggggccagtcctcgatgtgtgtttaataaacttttagcatcatcgagcaaaaggtgcagtcaagtattttggttcccaggagacaatgcttgctcgttagagacttgagctccatttcagtctccagggtgtttcaaagccaggtagagctgtgttcccaggagaagcctcgagttttgattgcaatctgtgcttctttcagccagaaaataacccgtccatctagaaatgctgtttttcccactcaccactgtgggtcagtgcgtttgaggctaaggctcccagatgaattcccaaggttgaggcaagttactctaaaccagtggttctcaactgggggcaactttgccccccagggtacagttagcaatgtctggagatacacttggttgtcagatcctgggggaagggctaggaatgctgccaaacatcctataatacacaggacagctcccagcagagaacgatctggttaaacataccaatagtgcccaggctgagaaactgcacactaaacgtactaaaaagggcacttccaagctccagaggcgcagagatttctgggtcccccacccccttccatccccacttcccaccagtatattaagataattaggagctcagggcctgagtaggcataaggcaagtagcttcatttattgtttcctcctaaaggaaatgaccaaccagtgcctccatcccataaacatttactagcctggaaggttctgaggccctgctgccatttttaagggcttctctctcaagaaatgttaggtcaagtcagtcaaaaactgaaacttgagaagtgggaagattggggaatggagtagggggcattttacaaaattcaggaccaagaagaaaatcgaaagatcttttagatctcctcccaccctaccccctctttcttgaccataaactaacagctgctttatatcgggcaccttatgaatgaggaaaagagagttttaaagttctcagggcactgtcctgtgggtttttcttttacttgctgagtccctgtcgtgttaatgggtccgtagattgattcgttattggccttcagggcatcatactgaacaggctctaggactggctctcctgcccccagccttggaaatggcaggaccaccacaaagagcagctggtggatgagctcatggacatccatgcacccataacagagaaatgatgagaggtagcatcatagttgcttcctttaaaaaaaataaataaactttttattttagaataactttataagaacattgcaaagctagtacagagaatacttgagtacccttcacccagtcctcccagggtgaacatcttccacaaccacagggcatttgacaaaaccgagacgttcacattgctgtgtaactgtcaactcgactccagatttgtttcagactgtaccagtgtttccacagatgtccttgttctggcctaagatccagtccaggataccacattgtattttcttttggtttctttcctttttttttttttttttttttttttgagacagagttgctctgtcacccaggctggagtgcagtgatgtgatctcggcttactgcaacctctgcctcccgggttcaagcgattctcttgcctcagcctcccaagtagctgggactaaaggtgtgtaccaccacaccccactaatttttgtatttttagtagaaacggggtttcaccatgttggccaggctggtctcgaactcctgacctcagatgacccacccacctcagcctcccaaagtgctgggattacaggcgtgagccaccgcgcccagcctcttttggtttcttcttattaaaagacagaaaacttgacagaaataggtgagatttatttgaaactctcatcaaaactatcctttccctcctccccacgggcagctctcaccctgaaggtagggagtccttcctgcccatgtgtccatggtattactgcaatgtgtatgaacccacaaacaatacatttatgagttggtccccttgtgtgggaggttgggggcgggggtgcctatgtgtgtaattaacaaatggttacatcctaaacatccttctgctacttgctttctccttctgacattgtttccagtctacattgatacagtaaaaaaaaaaaaacaaaaaacaaaaacaaaaagaagtccctgcgctggggcgactattccatatcccctcccagagctacacctgcttctctctcgaatcccctgttcatgcacattttgattttggggagtttacaatactacagaccgtacacaaaggcatgctgggacatacggaaaaaaactgtttctgtggtcttttttatacagcatcttgaggaattgctattaaaataccaatctctggctggctatggaatttccccatggaagggttatggggtacatgtaggtgccccccacaggcactcagggccctatgccctgacaattatttttaaaccataaagaccgaggagaggggaggtatcacaagcagggtggataacagaagggaaaggtgtgtgcctgcttatctctatgtcacttatcagaacacgggaccacagagtcaaggccatgggctcggcttctgttttaatggtctcaacatcatctcctccacgctccccgctacctattcgataccccacaggttcaggaggaaagaatgggcagctctgcacccagcaagagctggacagacacatctgccccacacttcctagctgtgcatgtttgggccccttcagcatcctcctctctaaaatggaaatgacactgcttaccctgcagaatactgagagaactgcatgagggccccataaagatggctactctgaatccattgctgctacacagaaaggtcttagccctctgaggtctacaatccatttcagtgatgcatttagatgatgaaggggtctctgaatttaatgtctagattcagcctatgcaagatcctgcctggactaagaaatgtctctaaggggccagttgcagtggctcacgcctgtaatcttaacaccttgggaggctgaggcaggtggatcacttgaggtcagaagtttaagaccagcctggccaacatggtgaaacaccgtctctactaaaaatacaaaaattagccgggcgtggttgtgggagcctgtaatccctgctactcaggaggctgaggcaggagaattgcttgaagcccagaggtggaggttgcagtgagtggagatcatgccactacactccagcctgggggatagcgagagactccatctcaaaaaaaaaaaaaaaaaaaaaaaaagaaagaaagaaaaaggaatgtctccaaggcccaggagagaaagcaagcagctcttccattgtggacaagatttcatggcgaagtgataacctgtatcttccggggaaacaccagcagtcacctcattagccaggagcagagtaatgcttcttaattctctagatagtgaaccggacaaaagctgaagcttgcctttgctgaaagacaagtcataaacagggaagtcactttacaagtgggaatggaaagagatgttattgttgttgaaccaattgagtacttcagtgagatggaagcctccagaacatcagtctccaaaatgaagcgcaagatgggaggaggcaagaggaacccactgggagtcaggaaaagatatattacaattataattgttatgcaaattccaactgacaatcatgggagttcactagcttcaacaaaaatatctgcataattgacaggtggggttgaaaaatgaagctctggtttcagtaacacaccccacaacttacttcccacatttctgtctttgaatcttgtgagagacacttcaatcatgatagcgtggtgtcatctgtgccatttcctggacgctctctggtgctttgcctttctgagcaagcagtggtatcgtcatctccttgccaaccttgggtcaggtttggccacatggctcactttggcccatgaaatgtgagcagaagctctttcaggtggaagagtaaattttggggtacataccctaaatagaaataagttgtggctgggcaaggtggcttacgcctgttatcccagcactttgggaggccaaggcgggtggataaaacctgaggtcaggagtttgaggccagcctggccaacatggcgaaaccccatttctactaaaaataaaaaataaaaaaaaataacaaaaattagctgggcgtggtggtgggcacctataatcctagcaacttcggaggctgaggcaggagaatcacttgaacccagaaggcggaggttgcagtgagccaagatcgcgccactgcactccagcctgggcaacaaaagcgaaactccatctcaaaaaaaaaagaaaaaaagaaataagttgtataactactagttaggatcatttgtacttcataaaacagacaaaaatagaaatttttgaagttagaaagtcactcccaggtagaaatattaaaagccaacgcacagttcacattatctttccttctggcaccttattcgtaacattctgaggacctcagcctctcccagggactctgctgccaccaatgtgcagaactccacgcctccaccctgaacccacgatagagctataatgtgatacaaatgaaaaacaaacttctgggatttttaacgcaccaagattgtgagtttcttcacacacaataacttcatttatactgaccagatgaagggtcatcgaaatttgggaccaggcctttagatcagtgattctaaactgttaaatcatgattttgaaaacaccaaagaacagtccattgcaccgcaaattttcatgactgcaaacttaattaaattatattaaaatttaattttaattaaatgtatattgttaattaaaattgtgttaacaattaaaattaaaatgattcattagttaaaatttgtattaattaacaaacaccaaaattttgtattgcttttagctttagtgtctcctacttaaatttctatttttgtctatgttttatgaagcacaagctatcctagctatcctgcagtagttatacaacttattactatttaaggtatgtacctgaaaaggtagtagtgggaattggagatcaaaagcatttagaagagactgcttagaatgtcttcatgccatatgtgcaccgaaacaaccaatatctgagcaccttctatgccatgagaattctgcaaggctgtgcatgggcaggagaataaggctgtctgaaaaaaaacaggaaaagtgtcctttattgaaggccaaaacacaagccaccaaaaaaaaaaaaaaaaaaaaacttgcctgcctttgtgtgtgtaagttgccagggggatgagcacttggaccattatatgccaactgtcatgctaagagcttagctttttctttttcttcatgtagtccaagctacatgaaagcagaagacaggctggaagcacaagacagggcaggcctaaacccaatgcttagaaacacacaagtcctcgattttggaaacggtgcaagtttttattcgtggccaattttaattaagccaggcaacaaaagattgaaacttgaaagctactccagggagataaagatgtgatagaacacgtgacctcagagatgcagggaaacctaatacttggtgagtcggatttttcaaacagtataaagagctgaagggaatttatggaaagtcttgaatgagaaacgccacccctcggtatctggccctgaagccattctctttcgtcctctggtctctagaggcttctaaacatgctgaatccacacagggctttgttgttgcagcctaaccccagctgcgggagccttgggcagccttgcacctgctccaataaaaagtggggaagttgtgcagttctgttaatgaatgctttgggcttgtcactcccttgaaggaaaagacaatttgtactttgaccatcttccagaaaggattgggaagaaatacttcaataatgcaattttttaaatgaaacattttattttgaaattaatttttaattcaaagttgcaaaggcactacagagagttccggtataccctctcactgagttccagtttcccaagtagtaaaatcattaaataaccatagatgctaaaattggggaaaagattcagccttagactctattcatcctcaaataagtttggtgcattcattcaaattccattgatctctgaaagagggaggcgcacacatattcacactctggggaccattttcttgacatttaaaataacatgggcagtttaatctcagtattttaagattaagtacttaaaaactgaaatttggactaatataccaacgtaaatcttcatctggccaacacaataaaaacaagagctaccatttgttttacacctactaggtgacagcctctgcgcatgggtgatatgatttctatttctttagaatctgttgaggaagagattctcttgtagcctttataaaatgaggacacaaatgcagagatgttaagtaacttgcccaaggtcacacagctaatgtgctgtcatagtggaaacagacacataggtttaggctgtgtctaaagagaatcactgtggatgccgttccaatctcccttgccaagtcacacccactgctgtcaccgagaacttccgttacacggcagtgaagcccccaatcccccaccccatatatcacccagaattagctgcaaagtgtcaggagacttggccaggcagccccaagcatcagcgagggctggaagccttcactgtgaagccctttatagaaagccgcggttggcagcccccgctcctgcatgggaacaaattaacattggcattccaaacacaggaaaggaaggaaattggaaacacagtttatacttggccagccctttgaaatactgtaccatgctaccgacatcaattaatgaaaagcagggttgtgtgagaggctctggtttggaaatgcattaacacacgttcaacatgtttgcacaggaaccggattatatgcaccctggctccaaaacaataaagcaattaccctaaagctggtgctctcggagttgtcattaattcaatccactccacgcggatcagcacaggctttgcgcggctccccacaatgccttccgacacaaatgttgaaaaggcggtattgcacatgcttgcctgagtttcgcataagtaagtgtcaaacttcatgcactctaatatccccccaaatcataaacactctactttggagcggaaaaaaatacacagcagcagtcctagtattccctggcattgctatttcagtttgagtttgagcaattttttttttgccggggaagcttaaatgaactatctgttccatattaagaaataccaagtcacattttttgtcaattattatttgtcagatgccatttgctgcaaaacccggaattcaatcccagcttgaacacacagctaataccaaacggctcactaatagccgcggtcgtacatgggatcatttgcagtgaacaaacgcccttcctctataaactgtttcagggattggaaagaaaagcatgtgaagctctggaataaataaagcaccgtgccttgagctgcccagtacatgacccttgcatgctgtgagaacaggctcaaaatgacccaagagcaagtgcccacttcgcaattttgtaagaatgcttccgagaaaggattttagatgatgtaggtaaatctcattgtttttgacctgcaatagaaagaaccagctcgcttcttgaaggaccagcatccccagtcactgcctctacacacatgtccacctgcatctggaatccagggtccaagcaacagacatcacgggtgtctcctccccgctcctggtgacgtcatctcctcagctcaactccacgttgatctgggatccatcaagttggagcaatttgagtgtgtaaagctaaatgtgttatcattttcaccacaaattaacagtttctatgtaaatattggtagttcctcaccccatgaaggcgagagaaggcaaaatggcaccggcgcatttgatttaaactaattaaaagcagagggttgtgcaattcaatatattgattttaccagtgggacttaaatcttttataataagtgtacacagctgcagtgctctcccaccactacgctgtaaaggctaatccgcacattccttctgacaataacatgacaggtcccacacatccctgcctgtgccctaaccccggtgacagtgccagagtgcattaaggcgaagccttgcagtggcttgccaagaaaccagtgtgccaacagcccccccgctaagactgaagagtgagcgtgaaagaattaatgtggccagaagcatggtgcaaagggctccccattcaaaatattcaggctgttacacggatgggcagatggggaagggtggagacgggggagacttagggcacgctgattcttgcaatgggccaaatatgaccttaccaaatgagggagagatattaaagtgataggagtgatcaatcaacttagatgggactctccctggaatgaagtcaccagttgtctctgagttcagcggacacgtgatattcactcacatcgcaggcattccggtggtgaggggatcgcgcaccagctgtgtttatctcggcaaaggcttgagagcctactacgccatggtaaagccccaaaccgtagcttgagagggctgcatctcaaaagcggtttcgtctgtctgtgcattcagacaatcatcccccttgctgccctgaaactgatttgcaagtgggccatctctgttaccccttccatggggaccgctccacaaccgaatgacaaccctggaaccaaaaccaaaaacagccacccaagttggcatccagggctcagccttaccctgccttgattccagaaggaaaatacatagaaaatgaaaaaagttcaaagctgggtcacatacatgcttgggaaaagtggaggaaaatctttgatttatataagcaggaaaatgaggtttaaaagaagtgattttgaaagggttacgaaaaacacagctgttggtgcactcctatagcaaaggcgctctgcagaaagaaagaaggggggagctgtgtgacatctatattaacctttggctgctcaccagtgagggccggcgctccgagtgctggaatgtggagcagccccttccaaattttaacacaagccaggttacagctgcaaatgcctgcagtccacgctcccctttgcgaagcactccctgaaggaaatttttaaactgtaacagaatctttttctaatactctacagtggtagggcctgctcttgacgggcagtgggagaggtcttaatgccaaacacttgtcaacaaaaaggacagccagatggcataaagcaaaaatcaaactgcacggccttctccctactcttcagctacattaacaaaagccacttttataggctgactccaataatgataggtttccaactttctcttcttttccttcaaagattacacaaatttcatgccttcattacctggaccagagataaacatgatgacttccactcccctagtgccagccggctactttacaagattcctaacagagctgctggatcttcccagagaaagaatggtaacgggctatggctagatgcagtgtgcggagtcgccattgcctggggattatttaagagagggtagctgttttgaattccaaaattaagtctacaaagaggagtcggggttgttaatccaaaccagtttacaaatcttgccattgaacttaaggggcccaggctgggaagatgggagtctcactcaggcagctcagttcacattgcctggggctttatggtacaggctgggctttgtcataaggtgcggcctttagtcctcattcccaccacctggttttgtcgtaaattcccctctagtttcccctctagtttagatcccgctcagcctggcaaaaaacttgaattccaagaacgacttataggaacaaaaaccagtttggcggcagacagaaggaagaataaatgcaccaggtctgcaaaagccttcagaattcaggcaagggtcccccctcccgcgcacgcaggccgcctgcctgcaagacagcagagctctgcagtgcagggcgaaggggcagcagaggctgccaagatcctcacccatgccccccccgccaaactcccaccataataagaagtaatagtttgatatgtgcaagtgatattttctcactcttatgtaaattgtgagaataaacttgcctttagaaaacttcgaatactacagatcaacatgatttgcaatccaaggaaaaacactatagcagtactttctcagcaaactcagtggccagacaagtctcctacacctccccccaaccctctccaaccctactgccacccccaagtccctcctatggagaaattccaagctacaacaggatagaagggacaggccatttatttgtgtgctgctgcttagcagaaattaaaggccaacattagaagcatctacaggaagtgtctcgccaaactgcagcccaggtcttcacctaactaatgacctcgagtttagggacagagagagaaagaaaacaaggtcagtgcgctctgttaaaagccactctgccatctaatttggagtgatgtcccagaaagctagacctgagaaagtcagggtcccacaaagcccaaagccagcctgactgattaagaggctcagacaagccggtctttgtcctttcaagatgaaagaaatggattgaaaggtgtatgtacagccagaggaggaaaaccacccagctgtggccttcccaaacaagtcccagcttgctcctgccgccatggggggagcaaatagcccgcaccaaagttcccagaggcaccctccgagcaacctggtctttctcttggggacagggagccccggggcctagcccacactgccggcccataagcactgggggcttttttgctcttggtttgcagggccttctgcagaagccagagattacaaatacctttttaatgattccagccaggctctgaaggcagccactgggacctgcacattcagtgggagtccggggtacccaacagaagggaagatgctataaatcccccaccagagaaagggccctggctaaccccaggcttcaggagggcgacagagctctgcgttcattatttatatgtatgtatttggaattttcctttagtttttggtatagttaataaatacacattgttttaaaaaaatcacaaatacagaagtgcagacgacgaaaaatcagaccccacctcccactccgtaagccccagctatgcccccgcctctctacccctccagtaaaatctctctccagttcctggtgtcttcctccaggaggacacgatgatatacaagcacacatgcagcccactcatctgcaccttgcttctttccacctcatacatcttggagatggttctaaatcaggtcatatgttgctgcttccttcttaactggctgcttagtataatttaaacttttttgaaggtattttggcatctaaacctcccaccccttgctcgctgaagcttggttcactagttggatttagttattattaagtacagacaatggcctcccgggaactccagggaccttatcaggagggggaagcatgaaggcggatctgcgcttcccccgcgcccccagtccacgccccaggtgcccagcgtggggcttcagtatcattatttccatgttgacacagcgcccgtgggcgtgagtttgctgtcttgacttggttcgggttttcgcagcaagttacacaagtagaatgaaagcggctcaggaaacagcgctatcggggtgtgttatctcggaaaccaaatatttgatcatcagtcccgcagcgcgctggcgctgccggggggttagtttgagcaagtctggagaatgtgcgcgcacatatggagggggagctccccggccctcgctgcagccccaggctcgcgtcgccggggtcgtcgcggctccagtcggaaaccgggacccccagccgcccccgcggcgtcagctctgagatcccgcgcaacccaatcgccaaaacctgtggtttgcgcgccacacgtggtaaatgctgaaaatagattctgccggcccgggacctaccactaaatacttaaaatagaagactagcggcagggcacagtggctcacgcctgtaatcccagcaccactttgggaggctgaggcgggaggatcacctgagatcgggagttcgagaccagcctgcctaacatggagaaaccctgtctctactaaaaatacaaaattagccaggcatggtggcgcatgcctgtaatcccagctactcgggaggctgaggcacgagaatcgcttgaacccgggaggcagaggttgcggtgagcagagatcgcgccattgcactccagactgggcgacaagagtgaaactccgtctcaaaaaaaaaaaaaaagaaaagaaaagaaaaaaaaagaaaaaagaaaaaaataaacaaagaaagaaaacaaagaaaattagcaatggcaccgtttcttccccagctccagccaagagagaatggggcatccggcggcccggagaggggccccaaggcgctcggagcgcgcggtacgctaaggcgggcgcaccacgaggggacaggtagggcttgacagggagggtaagggggtgcgacggccgcgatgccagagccaggcagggctgagaggggcccaggaagggcggcaaggcagcctcgccgggaagggccctttacatccaggtagcgcgagccgcgccggcccgggacagctcacatgaccgagccccgcgctttgaacggcccttgcctccagccccagagatgcggccggcggcgtaacatggaggggacttcggaggatccctccttcccagtaacccctacaggctcaccgaacccagcgcgcccgacctgggggcgcacacagcttgggagtcatagggctgtgggtgggagaccctcgggcaggcactgcgatttcagccaggagcggaaagctgggcgggctgcatagaagaagcggctccctccctcccagtctcaaagtgcccccgaaaggagacgcgtaccctcgcctgcccttactcaccgaggttgacgaagctcatgaccatgtcggcgtcggtgaggaaatggctatcttgcaggctggccagaggggggccctgggtactgaagacggccttgtaggggtaggagaagccctggccgccgggcccgccgccctcctccaccgccatggcgttgtacaggtccagcatgaacatgggtgccgagttgtgcttgccctggaggtgcgggcgcgggcggtggggcaagcccaaaatggagaggatctcgcgctgcatctcccgccgctcctggctgcggaggcgccggtggatgaagctcgagtgcacctcgttgtccaggctgaagtcggccagggcggagcgcagcaggaacaggggtgcccagagcgccacgaagctgtgcggcgccgcagctcgcagtgagcgcacgtgcatcgcgccggctctacgcgctacccgggctccgggctccgggcccgcaccgccccaggtggcagagggggcaggcggccgtccgcgccgctcggtcacttgctgcagacgggccccgctgcgcccgcgccagacatggcccctccccggccggccgcgctctgcccggacccccgccccctgctcggtgctggccccgggcccctcgccccgcactcgcccgggcgcaccgcagggcttggaaagcagccccggcgaacgaaaaggcgagtgaggaggcgggcgcgggtgggaggagcagccagcaagcctaggagtccagagagccaacgccggggaggcagcgaggaggcaggcgggcgggcgagcgctccttcttcccgctcctctggcgctctcgccctcgggcggcggcaacccaccctcttccaacctccggcgcggatagcaggggccccggggcgctctcccagccttgtgcgccctggatcgcacaagaggccgcctcgggagcgccagagtggtacgcgctggggcctgggcggaggaggaggaggaggaggacgggcttcgaggggcccctcccgcgccggcggcctcccacctgccctcggccccgccctccccccagctgtgcccagtgggttcattcattccctctagagcgctcgacaaatgtttactgagtgcccacggggtgcctagagcctggcgggacgtcgcggggatgcggctggaggaatcggagccggccctgccctctcggcactcgcggtccggaccaggaaggcggcccgagcaggacgggtgggctgcggaccgcggtgggaaaagttgggggagcgcggaggtggcgcggaaatagaaggcttcctggaagcggtgacccttgagccggtcttgcccctcagtccctgtatccttttaagccagccacgctgacccctccgcgcctccctgaagccgttgccagcctgtctctgcgctcgccattccctccgcctggacctctccccactcaccacctcccgcccccatcagacgctgctttctcctcccagagacctccaagacctgccaagctgaggttgtttcctcgcctcgcccctcgcacgtttgttttctttcctgtagtttctcttgctgtctggaattgctgtttgagttactccgtgccttctttattgccttcttacccccgctagacacccagagcactggggcccggatcagcgatcttctccgcacctctggtacccgcagtgccttgaacccagcgcctggtagccactgtagctgcgcagtcacgatttgttgagtgaataagtgaactgcgtgtgagctgggggggttcttcccacctcctcctcttcggggccctgtatctttccagccacccctcagcctgagaccagacaccccagccccaccactagggcttcccatcagccctcctcgtggcagtgcctggggagccagccgctggtcttcacatcctcttcccctccaagggtctgtgcctgagacctccccatcggcctcctctcctgtctctcctcatccattcatccctcaatcaataccgagccatgcacgctgtcacagggagtccccagaccactcagaacccaccggtccctctgccggtgtgggatctcaagggaattactgcacccagagtggcagtgagggcagcggggtaaaagttcatcctgtctccttcccctcctggggctgggtgagagagtgggtccccagagggcctttgggatgaactgggaagggctgaggttggggaagcgggggcgcttgtctgggaggggctctggctaagcctcactttggggctgtccttcctggagcaggagagctggggaagagaattatggtcttctacagttttctggagcagaagtagtttggccaagtggccctctgggtctcccttggggacttttggactagatggcagcctgaggggccacatgggtggagaaaggggaggccagaggccaggcaaggagcagaaaaatgccagcctgcaggtcctggccatttacacacaggccccaggctgtgggatggaacaggtcttgagccccatgccagggaggggcctctacccacccaccaggcaaggccctcaaaccacccccaccacctgctcttcatccattcactccttccttcaacagacaagcatggagcacaggatatcaggaggcgagctgtggggcctgcaacctggacagtcgtacagggccccccagctcttaagggccccacacttggtttcctactctgaggtcaccatatgtggttctgaatcacctatgaacaaagtaccccctgccccgtactaattttgcacctggcccagatattatgtggccagtcccagggccaagcaccatgctgggcaggaagacatggccatgagcgaacccacatggcagactccatcaaggagccggcctccaggccagggaagcaaagcaagagccttaaataagattcagggactgaaggagaggcagatcttgtctatcactctctctggaaacaattcagaagccaggcagaggaggacatgcaggagggagaaggaaaggtgggcatcctggcaagcaggaatcctaccccagggagactggggaaattgcaggagtgccacagtcgtccagggtccatctgagagtgtacaactggagagcctgggtcacttcagcctgcaataagtgacaggcagtgggggcgggggcgcagataaacagggtgaggtgatggagggtgggaaggggagtttttggaggagatgccactgacctgagtcctgaaagacaagaaagagacaggcttttccagggaaaggcatcccaggtggaggaacagcaagtgcttgagccctgcagagcagggaacagaaaccaggctcggtccccagccctgcacacgccctccagcgctggcttgctagggacaggctatgccacctccagtgccagtagagaaaaaggaggtcattttcttccaaagtctgaaataataaggagccaaagcagccctgttcttcagtagtagtctctgctttttatctactctcaaatcttttggagggatcttcacaagcaggtgaggctgggggcaggggcagcaggtcttggtgctacaatttacatatgaaacaactgatccgtcagtgtctaagcaaggattctagtttacccttctttgtgcatctcacctgagcctattctgagcctggcacacagcaggtgctcaattagtacctgttgaatgaatagtaataagcacagccaaaacctaaagagaccggttgactgagggctgactgtgcaggcgccaagctaaggcatctcccagatccctcaccccagcaacccttcctctgagacgccatcttttctcatgcaagaggaagagacaacatgctcttcatatccaagacctcaagagataaggtttcctctgaagtcccacaaacccccatttagccttatcttttctgtgatccatgcttggtgggggggtctttcttttccctgtttcctccccgagaggcatccccaagactgcaccaggccctcagtgaatgccgaatgaatgaatgaatgaatgaatgaatgaatgaatgaaaaccggcaagcaagaaatatctggctgggagtgcatccgatgccagtttgggagctgagcccaccaccagaaaaggctttgagattgccgagggcaagtcttgtgtggaggaggtagcctgggcactggagcctgcccagccgcattcacactccagctctgtctcttccagctgtgcaccatgggcaagggacttaacctctctacacctcagttcccccatctgtaaaatggggtgactgatagcgcctgtcttctgggatcgctgtgaggttgcagaacttaattcatggaaagggctttgcacagtgcctggaacacagagaaaacccttgataaatgttattgtgttaccatctggatgaaaaggaaaatatggtaacaggaaagcctcctgagttacaaaataacaacaaaacttttcatgatggtctgctttttggccaagcagagaaaagcagatgtatcctgactctgagagcaagagcaaaagtaccagagcaaaagagagagtgaagtggaagggaacatgagagatgaaaaggtcatcactgcattccaatcctcacattgtgcctaggccccctgcaggccagctggggcccagggacttccctgggtcctatctcatttccccagcagctagcccccaacccacacacccccagttgtggttcccctggccagggcacccagcactgggctccaggaccgtaatctgatctgccccagtctgctccacacctggggccgcctttgcctggatgaaagacggcctggaattgtaaggggtgttattgtgtcgggtggcccggtcccagtgtccgcgcccctcgcctgctggcctcccagtgctgggccaggagttttcatttcctacatcatcagtcacatcttgctgaagtgattttgaccaagtcagcatgtctctctaaggcagtaaaaagaagaaaagaattctgctgacacacacattgttcagcgaggtggggacctcatcttcatccatctgccctagaggaggctcagctggcctggaagctccctggggagcacagccaaggaagccagtgggctgctctctctctgtccacaccacctggcaaaggccagatgacctggacctccaaccccaacaaggaatagagggccaagagctgcctcctgcacaggcttgaaaatcgttgtgtgcagaggtggaccctgcagaggaaattattagagcacacctgtggtgaaattttgtttcccacgcagatctctcattgcacgggaggcttggactcctcacgcttgcccactctgagattttctttgcacaactttaaaagcagcagaataagagattaaacgtcttccatcagtcttaagtacacatggcagtggccacagttccaaatggaaaatacagacgacacacacactctagagaaagctgataccatgcaggatttctaggatctggaagccagctagggggaagcagtggttttgtttattattatcagggctgttatttcttccttgattggaggaaatctggtatggttttgagcactaactatcctcggttcagcactagaggtagccctttcctccttccaaaacgtgacaggggagcggccgacctgtcacctgttgggagcacttgcttctgctgggcacctgctaggcctgcacggcccaagcccacatcacccgcaactccccactgcatggagaggctagttctgctcctcagattgcagaggaggaccaacatcccgagagcaccttgtccagagtcagacagccaatctaatctgtaatggagccaggatccaaagccacatctgtctacacagcccaggcctttaagcatcagtgcacgttcagtgacctgggagcagccccttccttccttgctttaacctaaagcaacacttctccaacccaactgtgcgtgtgaatcccctgggggtctgttagaacatagattcccacagtcagtctgagtgagctgagattctgcacttctaactagctcctgggggctcggaggctgtcgtcttcaggctgtatgttgacgatcgaggctctagatttctgaagttatagctgacaaattggggcttcaaattaaaacttcaatatctatgattccaggtgtcttttaaaattaactcattaattctcccaactaccttgtatgatttttattattattatccccattttacagatgaggaaattgaggctcaaatacttgagggaacctgcccaaagccacaccaatggtgagtgaatggtaaaatcagaattctgacgccggctatcttgttccaggacttaagtccttaaacattgaggtacaccaaaacacagggtttgtcttagtcctgtagggacctcccagtacccatggaggccttgcacacagtagatgccctatcagtgtttgaggaacatacctctgagcccttcttcaattcctcctttattgcagaagtcatacactcaaaagccaacgggcaccaaccaggtaacataaatacagagatgcaacatgaagctcaaggaatatttctcttcctcttaatttaatggaaggcaatcatgagcacagacatggtgacaggtggcaggagacactggcctggataaataaggagggtgcagactggggtgaactggaaaccacatgcccatgggtgatgccatccagaaatttgattccaacatcaccagaaagttctgattttccaaagaagctagaaacttgagtttgaatgtgacatctctcaatgtttatctgttggcaactaattcaactcgttttggttattagaccaaagaagacacatctaccagtcagattcgatgaatctggtttgcccctggcctcataaagggctctgctgtgtctggaggatgtgcccagcctcccccaacccatcacccaaaccaaaggaccaccaaggatggtgcatttcaagacagctccattgaattcatgattcgagggctactgagccagtggttgaaaaggctggaactgtctgcccctttaggcaaaatctgaccctaaccttccccagagtcccttcccagcaaaactctgctgtttggccctggtgactgatctgataaactccccctctccccagaaacatcaaaaaccagaattccatctgcaagagcaggagtgagtgttcattgctcctgcttttcagcatctccctcctcccagctagatctgagccctctcttatggttgaggatgccccatctggtgaatatccagagaggcactgtctagcctgctttgcagccagagccctgacaggtgaccaagtttcagccagtcagaggcacccaccccagaagctatcagtgcaggcccagactattctgcagagtgatctggggccgtgtcccaactagagagcccccaagcctggttctctggccttcccaggggttctgtgagcccccaagatcctctagtggtctccttttccgcaccagcctgcccaagctggtttctgttgcctgcagccagaagccctgctggatacagcactggggagctggagagggcatggcaatcatgtcagttaaaaggatacaggccttctcttttgtgcagcgctaaaacttttggtcaaggagtttttcacacatgctcgacacagaaaacagaaacagagcttctttggttacatagagcaggggagggactagggttaccacatttagcaaaaaaaaaaataggtgtccagttcaatttgaatttcagataaacaatgaatgaattttagtatgactatatcccattatattggagtatatgtattatatatactcatactgaaatttactcgttgtttatctgaagttcaaatcggactggacaccctgcctgttatcaggtgatcccagcaggggcccagagtccccaggcctgtttcttttcactaccattttctctgctcccagggttccacagaaaacactttggaagctcacctaatttgagacccctgccttttctccttcttctgcaaatatttcctctgttttcttttcttttctttttttttttagacagagtctccctctgtcacccaggctggagtgcaatggcacaatctcagctcactgtaacctctgcctcccggtttcaagcaattctccctcctcagccccccgagtagctggaattacaggtgtgcaccaccatgcctggctaatttttgtatttttagtagaagacagggttacaccacgctggccagactggtcttgaactccgggcctcaaacaatccatccatcttggcctctcaaagtgctgggattacaggcataagccactgtgcctggccaagatttcctctgttttcctcagtagaaatgccccttcttcaccatcagtccctgtatttcaggttgaactatcctcttctctaaaattcagactgggcacatgacccagcctggtcaaccagagatgcccatgcgatgggttcagtgacagtcatgtgacctaatccaggccagtgagattcaacttttagaacttttgctagaactaccggtaaaggggtctctcctcccactggggttgctaggtcaggggctgctgctggctgtcatcttccctcccttcagggagagcctgccctgtgagagaagccacaagacagtaaaacaagaaaaggcaggagactgacagcatcagtgagcccctggagcccactatccctgaagccagccccacccaggactgttcagtttaagccattgtgtacggagtttccagtcagttacaacaaaagtcctgcagaagcgtggttcaattccttcatcttgaagatagagaaattgacacccaaagagaaactgctgggcccaaagtcttacagtgaatcagggattagactgggctcctcgctcccagagtcctgggaactcctcaccaccccacgtcgtgcttctctccatctctgttgttttcttccttctctcctctccttcactgtgtttctcctcatttaaaaaattgtattctttcttttacttcgagttttatctttattccctccccattggtaaaccattactctaaatataacaggttagtcccaactcatgtgaaaagatcgtatgggaagattaacagatttgagctcatcttacatatgatgcaacaactaataagagttagcatgaatgacacagctatctgatgtccaagctttgctgattagctctcgtcttctaatcgccctgaaattggatgcagtatctcccatttcacagatgaagatctggaggcccaggggtcaaaggacttggccaagaagcatgactaacaaacgacaaagccagcattcaagcctggatgacccaattctgatcccctatttcacccagccagttgcccctgtaaagccagcctgagatttttatttccagagctcacatgataacaaaccactgagttgagttgccagatgtggcaaataaaaaatataggctatccagttaaatctgaattttagataaacaatgactaatttttttagaataaatatgtcccaaattgcaagggacatacttacactaacaatgagcctttgtttatctaaaatgcaaacttaacctttcacggtgtattctgtttggcaattctacactaaggggcttttacgcataaagcaagaagcatcagctgtgtccttggttctgcaaaaagcctcagggcctttgcacttgctgtgccatttgcctggaaggctcatactgatattcacctccttcacctcctctgggtctctgctcaaatatttcaccattaaagctttcccttgcccgtctatcagaagcaacccatgtttcttttcctcttaacaccaccacctgaaatacaatagttacatgtttatttgttcattgtctctctcctgccatggaaatgtgggcatgtgttttggtctgatttgttcactaccgtgaatagagcccagagcggtgtgccgtatgtagttgatactcaatgaatctttgctgaatgagtgaatgaactctctgtgagcacatcttggtttctgtctggaatactgcctgacttgagattgtcactcacctgctgagtggcagtgggcatgcccctgagctccccactccttgagctggactcatcacacatctcagagtcactgggagatcaggtgacgaaacagccttgagagtcagatgcaaacttgccggagcacgtatgcaagcattccagtgtgcttttctcttctcttctccttcaagcactcgtgccccagacaactgagcctcggaatacaaaccctaaaaaacaattttttccagtgttcagagcatatgcaagctcctcctacccctggcatcactgcagacagtggcatcaagcacttccaagtcggagggaaggacagcacaccaacagacatcagtaccaacgacggctaatagtctagacgtctggtccagttatctgcatcacctcctttcatcctcacaactcttttgaaatagatatttttgtgcccattttacagatgaggaaattgaggctcagattaatcagttctactgccagaaagcaatggaaccatgttttaattcagccagcctgatagcagtctctgagcccatttcctcacctgtaaagtaggtataattatagtgctacctggccagtcacagtggctcacgcctataatctcagcactttgggaggccaaggtgggtggatcacctgaggtcagaagttcaagaccaccctgaccactatggtgaaacccggtctctactaaaaaatacaaaattagctgggtgtggtggtgcatgcctgtaatcccagctactcgggaggctgaggcaggagaatcacttgaaccctggaggaggaggttgcagtgagctgagattgtgccattgcagtctagcctgggcaacaagagcaaaactccatctcagatataaatagataaataaataactaaatgtgctgccttgttgggatgtcgtggggttaaaatgagacattgtgtgtgaagtatttgcatgggtccaggcaggctgcacacacaggtggccaccacaggcaaccttgccctccccccagccagaaataatcaggatagaggatgtcatgtgaaggccattttccaagctgcccagagtgactgatgacctagcttgaggcaagacaactatccagagttatcagattcacttccttgggtatttgaaataggaaatccagagaaaacgaggttacaggaatgaggccaggtcaagaggtagaaagtgtggccatgatgggtggtgagcaagctggccttataaaggagctcaggccactggggtccagtagtgtatgttgtacactgtgcactctgggatcaacattcctattcttgcctttgagaacggtgacctctggagttgtgcagtacacactctcagcaactgtacccagcagctctgaaattttattcattcattgattcattcacatatatattaatttattcccaccatgtgacagtctctttcagaccatgagacggcagcagtgaaaagatattcaagacttttcacacaggtattttagttaggggagatggacgagaagcaggagtgactgacaagtgcatggagaaaaagaaagcccagcgagaggctgagagcagagggtgggaaggcctctctgaggaggggaggtctccaaagccaggcctaggaggagcagggggaggggactgtgggtagaggcaacggtgggtgcaaaggccctgtggtgacccacaagagcatctgggatgcttggctccagaagcccctcctaactccggcttttcctggagtcgatgtttccctgtgcccaggtccccagacacaagtgtctttatgatcccaccacattccttggggtggctcgagtcagtgcctctcacagcccaaagaactctgacccaacttccagctggggcccctgtccccgaacagagtctccagacatgggcattgctggccctggtctgttctcctcttccaagtctcagtgaccctcctcagccagacttctgccccacccatctctgcttccaacaagctcccagtgagctgcctgcatctgcaaagccgggaaacatgatgttcccagacatcaaagagtttgcaaaagattgtggtcaccttagacccagaccatttcctgaggctgctgtttagataccaagtccagggttttttctttaggactccagtgaagggtagaagctgtcctacacctcaagccaccaccacctcccttctctggaccccaccgtaatccatggctccttacaacctccacatctctggcactggagccctgattttgtttttatggggtaatattctttcatccccaaatgccatgtaggaatttgctggcggggtggggtgggaaccagagaaacaaaaggatgatttacaggggttcaaaagcctcattataaccagaaaattcaatttacagacatttggttcttttatttccatttttttaaggagagaaaagaaatcaatctagtgtgggcattttgagtcccttgcttagaggttcaaggcatctgtgacttcagaaagccttcttggcatgaagcaataaacaggctgagcagataaaaccaccctgtgtttaaaaagcaggcctgtctccgaggcagaatttttatagataaaacaacagaacgtgactcaaaaaagtcgtgttgtgaaaatggccccatgtagacacaaaattctttactcaggagctaagttctacagcagcacaggaaggtttcatctagataattctctacgtctggcttcaaggagccactccaaagccccgttttccagacgagtttcgtgttgcaaatatcacctccatgccttcaatgtttcactgcatggaggaccctctctctttctccggttcaccaaaatgtttgcacatgttgtgagggaaaatgactttctgtcaagtaagtttaagaaacgatgggctccagaaagggaaacatgtttcttcactgcaggacttctcaattttttttttttttttttttttttttgagacggagtcttgctctgtcaccaggctggagtgtagtggcgcaatctcagctcactgcaccctccgcctcctgagttcaagcaattctcctgcctcagcctcccaagtagctgggactacaggcacgcaccactacgcctagctaatttttgtatttttagtagagatgggttttcaccatgttggccaggatggtcttgatctcttgaccttgtgatccacccgcctcagcctcccaaagtgctggaattacattctctgtctttaattagggaggagagggtagagtgtttcacaagctgttatattaagtcagagatctatcatgtgcaagtgtcagaaacccaactcaaaacggctcaatgcccaactcagagtggtttccctaagggggaagtcctatcaacgctgtgcccaggggctcatggagtgacctctgtctctggggctccatttctttctgtctccatctttcaactcggcatctatctgaatgctggcttcattatttcctaccacagagaggtttcctctgcattgccatatgtcaaggccagcaagcgaccctgggaagagagagagagagcctcttgctcccaggagagaatgtccaggtcttggcttaccttgcgcaccagtaatggcaaacggggaagggagcacctggatttcccagccttgtctgctcacctctgagtcagggtggaggtcagggcactgggtcagccccaccagagacccatatggtagggcaggcaccatttccccaaagcagggggacgccatcacctgaatccaggaaggggcactgggtcagtaaaaaggaaaccaaattttcctgggcatggtggctcacacctgtaaccccagcactttgggaggcagaggggggcagatcacctgaggtcaggaattcaagaccagcctggccaacatggcgaaaccccatctctactaaaaatacacaaattagctgggtgtggtggtgggcccctgtaatcccagctactcagaaggctgaagcaggagaatcacttgaaccctggaggcagtggttgcagtgagccgagatggcgccattgcactccagcctgggcgacaagagcaaaatgcaatctcaaaaaaaggaaagaatgaaagaacgaaagaaagaaagaaagggaaagagaagaggagagagaaaagaacagaaaagaaaagaaaatttgatcaaaaaccccccttgatggccaagcacccagctgaactggggttctgtagacagaggccctggggagcagatgcttaccccggacaacgacctctccagctctgaatttctgtgctggcatgggtttgcaggtcattagcactgggtgccacatgcccgttggtttgtgagctcctagaggacatgccgcatatgctgttttgtactttctgtgtctaacacgggactctgcatacagtcagtgttcaatgaacacttgatcaatagaggagttcacagatcccctgctctttttcagctgcggccctaactcagtccagtgtggttcctgacttctcatccacctccgtcatgagaccatctgccacaggctcctgcctcctggttcaacacctggcaggtagcggggactcgacacagctgctcaatcagggagcagccctcgcttgccgctgggttttgtttgtgtgttggtttttgtgcccgtctttgttcctactttgaatttaaactccttttgtctgctttttgaatagattcttctaggggttcattctatcctcttgcattaattatttagtgagtattaccatgtgccagaccttattctgagtgtggtgcgtacaggagtgaacaacatggaccaaacttctccgcacatgggacttttaccctaacagggctgttagactgggcccagtaacacagggcaggggtgcagagagggacaaggatgccactttagctataataatcaggaaaagccccggatctgagcagagacccctgaggacagaggggagggagccgctcacatcactggggaagagcattccttttttttttttttttaagagacggagtctcgctctgtcgcccaggctggagtgcagtggtgcgatctcggctcactgccacctccacctcccgggttcaagcgattctcctgcctcagcctcccgagtagctggaactacaggcacctgccaccgtgcctggctaatttttgtctttttagtagaaatggggtttcagcaccaccaggagcaggacctcagcccacccaggactcctgaatcagaatctgccatttgctcaccatgcgatcctggacaatttgccaaacctttctaggtctctgttttctcatttgtaaaatgggctgaattatttctctcatctatctccctcagattgctgggaagaaccaatgagataatccatggaaagtgcctaacacaaaatcaacttaagaaatgacaactggccgggcacagtgtctcacgcctgtaatcccagcacttgggaggctgaggcgggcagatcacttaaagtcaggagtttaagaccagcctggtcaacatggtgaaaccctgtctctactaaaaatacaaaaattagtcaggtgtggtggcgggcgcctgtaatcccagctactcgggaggctgaggcaggagaattgcttgaacccaggaggcagaggttgcaatgagctgagatcacccccactgcagtccagcctgggcaacagagcgagactctgtctcaaaaaaaaaaaaaaaaaaagaaagaaaaagaaagaaagaaatgactggcagccagtaccactcttcatgttggcctcgcagttgatatttcctcaggagggcacttctgaattcctcaagggagaaagaaaaacagactccaggaatatcctggttgttgggcacagggaaagcaacactgctgacgtccatctgatatagaattctcagaaatgctgtgatacacctgttggcctgtagctttctggctggttcttgtttgcacttgggggtcatcttcagggccttgcagggacgtgtttcctagagttgagaatccagaacagcaaaacgggctcctgcgactcctctgtttcgacaaattcatgacccgaatgaaagtggctctgagctgcactaggccctgcacacagacactaactggcagctttgaaaatgaccattctggaaatctgcatgaggtttccagaggtcaaactaaataagctactgaaactagtcatctctcgaaatttcatctttggtaatacagcaaaaaaaaaaattcaaaaactttttgttttgttttgttttgaaacagagtctccctaagtcactgaggctggagtacagtggcatgatctcggctcactgcaacctctgtctcctgagttcaagcgattctcctgcctcagccttccaagaagctgggattacaagcgcccaccaccacacccggctaatttttttgtatttttagtggagacggggttttgccatattggccaagctggtttcgaattcctgacctcaggtgatccactggcctcggtttccccaagtgctgggattacaggtgtgagccaccacagccagcctaaaaataacttttttaaaacaaacataaattttaaaataacttcttttaggcagtccattccatggaattggtggcactgacctcatctgatgtcccagaaagctggccacaaaagtttccatcccccatgacagacaaacagttctactctggggcaattctccctgtgtccagaccacaaacgcccctgcctgtttggtgcatctcagcagcagaaaatcaccaaccacaaagctttcaggaccggcatttaaaatcaacccaaagacactccccttccacatgctctgggctccgtgcgatctttcatagcgcagctccacgctcctcctcgcagacgagactggcattcaaaccaggaattcttctgaggggctctgtgtgcaggaatacaatcacctcaagctcgtgtaagaagaagagagctccagttaccagggcttccgaaggcttttaatagaaaacatttgtgccaaataaaaagcttctccttgtgttttgctttagctgtaaattatctgctccaaggatccacccagaaatccctactgagggtgaactccacagtgtggttgagtccagatttgttgctcggtccagatagattttcagctgctgcatccaaactgcagccagggggacaataagaacagaacctcttttgttctgatgaaactgtttttaatggtcccttctaggccgggccctagtggaagtctcaacaaggctgctcattgaaacgcccttgaaagagccaagtggggagcgcgagggaccctggggaggggccggcggccctttgctcagccctggtggtcctgccgcaaaggagagctgggctgttttatttgttgtctgagatggaaaagggggagggggtcgtcgagacgaggaccgtcccgcaaatttctataattactgcctgcagagtgttagggacacacacacagtaacatcaaacgtcatcctggagggttaggggttcccaaaagctgaacacccagaagctggtagagcaaatccactaaatggaacaacatgtgttccccggcccaagaactccaactgcattaagggaggcacatttctgaccactttacttttcatcttgaggcctcagggggccctttggttcatgcagaatccaggatatagaggggaagaaacagatggaaagatacgaaccgctaccagggcacaagtagctgcctgccccgcacccttcttaagccccaatgtctgcaggtgtccgtcctctgagggtcccccagtggcacctgaaggatgctctccatgtagcaacagtgacaaaagaaataaggaaacaagccgggcatggtggctcatgcctgtaatcccaacactttgggaggccgaggtgggaggatagcttgatcccaggagttcgagttcagcctgggcaatgtagtgaaacctcatctctctacaaaacaaataagaaagaaaaaatagctgggcatggaggcacatgtttgtagtcccagctactcgggcggaggtgggaggatcccttgagcccaggagtttgaggctgcagtgacctatgatcacgccactgcattccagcctgggcaacagagcgagaccctgtctctaaaaaatgaaaagttgtgatttatccctcagagggagtttccccacttttgagtgagattttaagtttgcctctgaagaacatgctctggttccccacaaaagcaatcggtggttctcagcagggggcaattgtgcccccacagagaacatggagcagtgtctagggacatttttgctgtcacaactggggaaagggggtgctactggcatttagtgggtgaaggtcaaggatgtggcttaacaccctctgatgcacaggatgggccccccaacagtggaggatctggcccagaagagaatagtgctgaggtcgagaaaccctgggctaggaggaggtgactcagaccccattaaagcacccaccgccgctgagatgggaaggaccctcatttgtttgaggttcaggaaggatcaaattgctgtctgactggtggaggcacaatttctcctttccaagtgcatgagaacaagggcgactggggctctttaaagaaacaggttttagggttagtctttatttggcactaactcatcttaaattgtgtgggggaaatggaatacaattcaagttgtattactaatcaatctttgagtagaataaatcacaccaaatgatattctattaaatctgaaagtaattaaaagccatgcaaaattctggactttcatcaaattttgctcagctcaaaccttctaccctgcccccaaacacacctgcttccatcaccagagactgtctggaggtagaacatgcttagtatttgacatattggtttgttaatcacatctctttgtctctaagaagtgatgagaaggggctgatatcacagaactttgagcagagagggaaggggtgaagtttaggatctgagccccaaggtttgagtcccagctctgccagcggtgtgaccttgggcaacctgcccccaccaccccaaaacttggattttctcatctgtaaagagggagtaaaaatagtttcctcctcctaggcttttgttgttttgggggttgtttttcttgatgttgtggttttgagacagggtcttgttctgttacccaggctggagtgcagtggtgcaatcatggttcactgcagctttgacctcctgggctcaagcaatactcgtgcctcagccccacaagtagctgggactacaggtgcgtgccaccatgtgtagctaattttttttttttttttttttttgtagagatggggtttcaccatgttgcccaggctggtctcaagctcctggactcaagtgatccacctgcctcagcctcccaaagtgctggcattacaagtgtgagccaccgcacccagcctcccagggttcttataaagattgacataagataatagatttaaacttttcagcatactccctggcctctgggacgcatcagaaggtgttggcttttttttttttttttgagacagagtttcaccctgtggcccaggctggagtgcaatggcgcagtcttggctcattgcaacctccgcttcctgggttccagtgattctcctgcctcaccctccctagcagctgggactacaggcgcatgccaccacacctggctaatttttatatttttagtagagacagtgtttcactatgttggccaggctggtctcgaactcctgaccttgtgatccacccaccttggcttcccaaggtgctgggattataggcgtagccactgcacccagccagctatctttatagtccaactttgcccctctgcaggccccaggaagcctggagtgatggggtccatccccttgctgcgtgttggggcaccccgcttctttgcacctacataattgtatgggtcccaatgacttttgtggcttggagtctgccttcccctggagaatagaagctctggaagggcagaacagggctgtctcagcacctggcacaaaactcaataaatgcttgtgtaatgaatggcgaagggaatatttgccccatatgaagagcctggcttccagtccttgctctgcaacttactagctgtggacttgggataacaaaaataatagccttttctttcccacgcatctaagtcatcagcaggtcctgctgcttctaccttcaaggtagagtctgaccctacccacttctgccctgggtccaggctacatctgcctggactgtggccccggaagtccatgccacagcccacaattgccccccgcaacttgctgcctgccagtatcactttgccccattccagatgttccagctacgctgcctcttccttctgtatcaccacccagaccaccctagcaaaatctctccccctggggtcaaccattgtctgtaataccttttatttatctgccacatgttgtctttctccatggaagagtctctttcttccttatcactgcatttctaatgcctagaacagtacatggtccattaaaagaaaactccataagtatttcctgaacaaatgaatgtattgatttaattaattgatggttgactaattaatagtgaagggcccaggctctgaagccagactacctgggttcaaatcctagctgcttcacattctagtagaacgtcctgaggcatgagatttgggctgtttgagcctcagctgcctcatctacaacatggcgaaacagccacatccatttttggggttgctacaaggattaagcaggtccacactacgtaccaacttagccccacactgacatctcagagatactcagtgactgcatggggaacgcgttactgcctcatagtaggacgacatttgcccatttgaaaagcactcctacgctctttccttttaagcaattcaggtgggaccttatggaattgctgatatctgaccgttttaacctacaaaaatggcagcttcattggggttaaaagatgtttccccaggccacacggctgggaagcgcaggagccactcttgaattggaactcctgctcagtgtgttaactgggcccctttgagcctttagaagctggcatctgacgccaggagaactccaggttcactttgttcctccctggtggcaggaaggaggcagctgcctaaacagtggtgccaggagggatgatggccacaggggcgtgcaaaggcagggaccgcagtgcagctgagcaggagatggagtcttgcgtgataggaagagatgcccctacctagcctctgagcccattccctgagcacatcacacagctccctttcctctctttctttccccattccttccttccctccttccctttttccttctttttctttcttcctcccttttcttttgcccttcttagcctttctttcttcattttttaattaaacaatgactggattcctttccagcagtttcacaaggggtgaagtcacttagcaaccttaattatttccaacttaataacgtcctggggtgggggacaggtcgagcccccagcggccggaatgccttgctgggtaagccgctcagaggcgggctctggagcaaatgaagcgtccgaccaaatacttctcatattttccctctccctggtaagggcttttgtttggagtgaacctttttttttttttctccccctgataaacatgaatgactacagttgactgcaatttttttcagctggctgtagcttcaaagatttgaggggtttgaattccaggctttaaatcacatgtttttccctttttgctctcagacacacctatagtagataatagaaatatgaatttcatcttcaactaaaaggaaaatagggagatctgttgttgggagtagaggagttatcagcggtcagactggtgtgaacagtgtgcagtggtggaaaccccatagatcatcgccacccactgagtaatgacaaggaggccagcatggtcctgccagatcatctcagccaacagttaccaagccctgacagtgggcaggcactgggcatagcccctcatagacaccgtgcctcggaccaccctagagggtaggtgccaagattaccactgaaaaagctgcggcacagagaggttaagcagcgtcccctgggtcacacagctccatcatgaagctgaacccaaatgcattttttcctccaaagcctgcttgcctcccccaagacctctccttcctcaccaaggaataacactcatgagcaagcagccataaatcaaaacaaataaaacatctactttgaagtgctgccgtggcgcttcgatgagataaagggcacggaagattctggttcttgattcctgaagaaacacttgcccatttcctgcctctcccagctggcaagacatatttgtaaataccgaagtcaaagattcaaacagattagggttcaaattgggcacaagtcacttactggccatgtgatctgggacgggccacttaactgtttctaagcctcagttttcctcatctggaaaatagggctcatggcagcacctacctcatggggctgtggagagaattaagggagaaataacagtgagtactcgataaatgtcatctatatttttaaaacaaaacaaaacagtaataagctggcagaactacagaggatggcggagactgcagagcgcttgccagatggtgtctttgctgaaagaggaattttctgatccagcctgaagacagccccaagtgactttcctcagcatttgctctgtgccgggcaatgtgctacgttccttccaggaactggcccaagaacattgccactgtgctctcacttaacccctgcgacagccctaggaacaaagtctgggtgtgagctccgtttttcagactggaaactgaagcttggagagaagtcacttcttcaaggtcacacacgagggcggggcagtgaggatgtaaaccgaggccagtccaaagcacgcctccccacctcccgacccagctgtccatcactccagggtagccacttcctgccatgttatattcattaaaagtttagaatccacctactatgcgtcagcccctgagtgatctaacactatcatcggacggcacaggggtgacgtgccaagctgacacctttgctgtttaaaagggaaaggagagcaaatgacctaataggtagcagactttgggaaacccgctgggactccttcatagctgctcccttagcaatatggtttgcagcagcgctgtcataggagaacacgggtctgggttcttaaaaaaacccacatcccacaaagcagcggggcatcctctgcatggggtggggggtgctccaccccccaccccatgcagagtagaagcaaatcctgaattcttgcagttccccaaaaacgcttgtctggtcagatgttccaacctcctcaagggtgcctggagactgggcaattctttgtcatgttaatgaatcattttaatagagtgttttaacaaaaacattcatcaccttttgtgcaacaaggattttcttttttgttctacttaaatggttaagtaggtaataaacgcctatcagctgcaccaccacagcctggtaatccctccaaaccctaaatcataggaggattattattgtcctgataaattaacactcagagaaagctggtgggccagggtttggagctgtctgtcccacaggaaagaaaagctgggttttctttgagccgagttcatcagctgaccagctgactgccctccagcctgggcaacagagtgcagtagaccagggaggccccactcccatccactgggcccctgctggctgcaatgccaccctggggatgggcgcttctctctccctgcaactccccactctctccatcagttacaaaaggccctacaaggaatctggccctttgctgaatcctggggcaaccaaaagaaggaaacagacggtacctttgtcctcagggagtgacaggctcctgagggagcctggcaaggctgtccagggccccaatgcaatcgccactgtggttggcaccaggaaggagccgggcagaggactggctccctggtttagggagggggcttggcaaaactccgtgaggaggagacattcatctcagaggctggggtggctctgatctcctgcggggcctggctgagccacacttccagaactgccttccatgtgggtttctgctgcgaggctgtttccagaggctgctgtcacaaagttctgaacgcttggatggctgaaaaccacggaaatgtgttctctcacagttccagaagcctggaggccaaaatcaagatgtcagcagggtagcactccctccagacctctgggggaggagccttcctggccccttccagcttctggtagccccaggcgtccttggctgtggctgcatcaccccaatctctgcctctatttccacctggccatcttctccctgtgtgtcttcccgtcgtcttccctctccaggtctgtgtccacgtttccctctccttattaggacagttctactggatcaggagcccaccctattctaaatgatctcattacctcaattaattacacgtgcaatgactctaattccaaataacgtcacattctgagatcctggggcttagcatctcaacatatcttttgggggataccatgcaacccacgagaaggaggccaggagagagaccctcgagtgagacctggagggtgaaaccacctcagccccttgcagcacgtacacacacatggttgctctccactgcacactgcatggcccggggcagctaccagcctgctgctgctccacctggccctggctcctcctacagcttctccaggtccaggtgtgtgctcagcttcgtgataaagggcccagtgctggtgacatcctcatcatcatggtgagaggcaacaagaatggatgcggggctcagtctgtcctcagggcaccagctcgtgccgtcggtcccagcttctccctcctctccccattttgcatccaccttcctttcccaactgtctgttcttctgactccacgcacctggacctgcccaggtctcttcgggtccccctttctgcttttgtgctctgctcccaacttccacagccggtgcccggtgctctgtgccacagatgctccccctgcaggtgcagggagcgggacacacctggtccccaccttcccgaagcctgtagccagagactgaaagcctagccctgccttcaggcaggccaagctctgggtgttattcacagcccagaactccctgggatcaagtgaggctgggattgtgcctaaaatcacacagatttccttgatgttttcccttctcggttctgctttcctgactccaatagtggtttctcctggacatgtatccccaataaaccaccagcgtgtgaatcagtgattctgggtctgcagggaaacttgctctaatgcaaagatatttagcaaagtgatttcaaacagcaggttaggagtcaaacagcctgtgctgacgcttgtggaaggtaagaccaggggcttagtgaacaggtgagtgcacctgtgtatatcctgggtgccaccccatccggccacactttgtgttaatgggggacacacaaaggggagaccttaacccataggaccagtaggtctgatcacacaggctgccctgcgcatgtgaaaagtgggagctgagatcaagcccactaagactgtcgggaggaatggacatctttgcttactaatttgtgttttgaaaataattttaggcttgcagcaaggttgcaaaaccagcagagttcctatctgcccttcacccggcttcccctaatgttagcatcttgcataatcatggtacaagggcgtctttttaaagctcagctaaggtacccatggctagcagctggactccacccagaatgagtaggggaggcggggaaaatgtcacctcagatctgaaggatgggtaaggttccccaggatgataaccctaccccaccccagaagcggggaaatgtgttctgggacagacagagcatcctgtgcaaaggttcagagcagaaatcctgtgtccattgtgcagctgtgggaggtgatgtgagggggccctaggggaagcaggagacaaaaggggctaccaggccctggcaaccacacgatgctgcagccagggggaccagggcaggttctcagggccctctccccaccccagagatggctgtcttcactctaagagaatggagagggggtaagcaaaggatccacaaacatacaaagactccacagagaagccagggtcccaggaccagactcatgaacaggggctggggtcacatcccagctggggcagccctctccaagcaggaaaggcagcaccccagggctcagtgggcccctggtatgtgtgtttgcggcagcagggggtgggtgggggatctgagcagtctaggctaccccttgggggctgactccaccccatcgtccttcctcagtggccaggaagccatccccctccccttctttcctgtctcactcttcctcggaggtccctcccagacacagctttgtccacattatcagttggtcacccccaactctacccaggcctgtgctgtctctccttagaaataagtctgtctccttcctgataagccctgagggaaggagactgtccttctttctccccagcctcaggcccacatctggacatccagaggcacctgagaaggctgaggtgctgatctaattagctgagtaaagcaattggcactaagctgtgggtggcccaggctgcacctggggctggatgccgggaggccacagagtgaagctgaggagcccagaccagtgtgcaggggaggggacagcggatggggaggggcacacagatggctgccccaggaggtactcacctggaggctatctcagagcaaggatccctcccatctcccttcctcaactttgggggaatctctgccctccctcccttcccactaagtggtatcaaaccctcgcctggaggacagttttgccctctcacagatagaagcctgctcaactttgacatctgtgccgaaatcatcccaaccacccccatagatctccaagggcactgtcactgccatccacaaatgacaccaaatccaccaatgatgtacaaagggaatgcctgggggagaggggtcatctagtggaccaggagtcttgggtgcccataaacttcttaaaccactttcatgtgaattctctttaattcaacagatcataattccaaatctggttataccagcaggctgatcacaagtgaacatttaagctctgtgccttggtttccccaacagtaaagtggggtaaggagggttcctacttaatggggtggctgtaagtattgcaatggcagaatctacatgaagtgctcggtcgttgtgagctgtgggcctctgtgttctgcttctgctatagtggaggaaggccgagttcacaacagcacacctggatacactctttctggaagtcggtgttggaatatgggtcagaaggtgaaacatacttcttaccagccatgtgatctcaattatttaacctctccgtgcctccatttttacacctggaaatgggactgacaatgcctgattcatagatcattgtgaggatcaaattaattagtaaacgggaagtgcattaaaccatgcctggatccagtgggcacttgattgatattacggctattatttggcccagattctatttttacaattgtaactccaactttcaattttacaattcctcaagtgtcatatcatatgcgtataatgctgtttgttgctgcagagctatttgtaatggcaaagaattggcagccacttaaatatcaaaccatggggtgggaacaatatactgtagatcagctgtccccaacctttttcgcaccagggaccagtttcatggaagaccatttttccacggactgggaggaggtggggggaatggttttgggatgaggctgctccagctcagatcatcaggcattagttagtctcataaggagtgtacagcctggatccctcgcatgtgcaactcacaacggggttcatgctcctgtgagactctgatgctactgctgatctgacaggaggcgaagctcagatggtaatgctcactctctgccaacactcacctcctgctgtgtggccccattcctaacaggccacagaccggtgctagtcctcgcccaggggttggggacccctgttacagatcatccatatgatgggattctttgcagcggttaaaaaaggatgactctatttggaataatgtccaagatgtgcctaaagttaaaaaggaaacaagaagaagaaggtgactaaacaatatgcagttattccattttagtttaaaaaatatggtcagggtaggcaaatacattctaaaggaattttcacaaactgctcatttctagagaaaaggattcactttctccacttatgtttctatatttttatagtgagaatatatgacttttgtaatcgacaaataatatcataacaagaagtgcacattaaaatgaaaatggccatgattgctgtctttggaggagggtgggaacaaaccgtgaaatactgtgactctggaaagggggagagcccagctccagaggtcaaattccactgcagtgacctggaaagggctgtcacatactttgcaaaaggaatctcagggcattgagtgtgactttaggtaggtgacccaagggctgtgctaggagatatgttgctaatcagaggtgcaggcagacaaggagtggggcctgccgtgctccatcagccccctcaggacacctagagagacctgccagctgctcagaccagggagactttgatctaaggggcaacagatgagattctccctccttgggatgtggccacttcaaagtggaagagcaaagagcagattgggggacggaaggctgaggtggcacaatcctcctttccccccgtcttccttgcacacagcttcttcttcagccattctgggttcatgaaatgtcacagagctgtccaggtcctaggcataaccagtgctaccattgttgagggctttctgcaggcaggcactgcgcactaagcactgttttattttatttttttattttattttatttgagacagactggctctgtcgcccaggctggagagcagtggtgcaatcgtagctcactgcaacctccacctcccgagttcaagcaattttcctgcctcagcctcccgagtacctgggattacaggcatgccccaccacacttggctaatttttttttatttttggtagagatggggttcaccatgttggccaggctggtctcaaactcctgtcctcaggtaatcaacctgcctcggccccccaaagtgctgggattacaggcatgagccactgctcctgaccacattaagcactttctaaggctcactttcttccacctcctgaataagcctgtgggttatgttattatcccccatagtacagtccagagcctgaagctcagaaatttaaatattttttacaagtcacacaaataataaattgtacattttgcaaatcttacaaatttgtgcacttttttgtacagattacaattttcacaaactgtaaaacctggaatttcaattgattttgtgttgaaaccgtcataaacaataaatcaaccaaccagcaaacaagaatggtgttgcgggaaagctctatagagactcatttcattgcctaacaaatattagattgagcatcttttatgcacagcatactgtccaattgttctaggtcctgagatgcctcctagtacttttatttttatttatttatttattttttagatggagtttcattctttttgcccagtttggagtgcaatggtccgatctcagctcattgcaacctctgcctcttgggctcaagtgattatcctgcctcagcctcccaagtagctgggattataggcgcacaccaccacgcctgactaattttgtatttttggtagagacgaggtttcaccatgctggccaggctggtctcaaactcctgatctgcccgcctaggccttccggagtgctgggatcacaggcatgagccactgtgaccacttcctcctagtacttgaaacagtgcctgacacctaacaaggaccccaagtgatatttctggtatttctgaatgaatgaaagaatgaataagtaaatatgaatgataatttttttaagacagggtctcactctgtcacccagactggagtgcagtggcttgatcatggctcactgcagccttgacctcccaggctcaagcaattttcccacctcatcttcccaagtagctgggaccacaaagcctgtgccaccacacccagctaagttttttagtttttgtagagacaggtctcattatgttgcccaggctggtctcgaactgctaggctcaaacgatccaccagatttggcctcccaaagtgctgggattacaggcgtgagccaccgtgcctggccagttctgctcttgagcaggaccaagatcatttttgtacaaggttatttattgcaattctctctgtagaagcaaatgatcaaccagcacctaaatatttccagcaaggcggcctcatcacggcacatccactcatgaatttcatgtcctgaagtgaaaggagctttgaaagacggctcaatggaaaaagcaagacgcagaaaagagtgcataatattctgccgtttgtgttaaaacggggactatatatatacatatacatatatttgtattgccttttatctataaaaaatatctgggaggataaataatgaactattaatagggctttcctattgggatgggaactggggtcgatggacgggggcagggtgggaggggggttcttagtgttaacttttacatacttttcgaactagaagctgtctgaatgttttacccactcaaagtgctaaataatttttattgaaattctgttagttgaattttactaaaattcttttaggatagccaaaaaaaaaaaaaaaagcttaaaataccaactattgatgagaaggtggtgcagctggaaccctcctgcgtttcagggtggatgctccatgggctccaccccttgggagctgccgggcagcacccactcaagctaagtgcacactctccttgagggcatgagcaagacaagtgcacgcacatcggcacaaagagaagcacaggactactcaaagcagcttggttccttagagccaagaactggaaacaactcaaatatatacatcaaaaatagaatggataaataagttatggtagtctgggtgcggtggctcacacctgtaatcccagcattttgggaggccgaggcaggcagatcacaaggtcaggagttcaagaccagcctgaccaacatggtgaaaccccatctgtactaaaaatacaataaaattagccaggcatgctggcgtgtgcctgtaatcccagctactcaggaggctgaggcaggagaatcgcttgaacccaggaggcagaggttgcagtgagccaagattgcaccattgcacagcctgggcaacagagcgagactctgtctcaaaaaaaaaaaattatggtatattcatcagtagaatactacacagcaatgaaaaatagcaacaaccatcaatgaatctcatggacgttgtgttgagacaaagaagccagacacaaaacagaacttactatatgattctatttacataaagttccaaagctaatcgacagtgagagaattcggtacagtggttacctttccgctaggatggggagaagtgctgcctggaaaggggctcaagaaagtcctccggggtcatggaaatgtcctatctcttattccatatgtatggaaaaattcatcaagccatttatctaacaatgtgtgtgcttgatgtaaagtttgtaactccattaaaaaaatatccagcctgggcaacatggtgaaaccttgtctctataaaaaaaaatacaaaaattagctgggcgtggtggtacatgcctatagttccagctactagggaggctgaagtgggaggatcacttgtgcctgggaggttgaggctgcggtgagccataagcatgccactgcactccagcctgggtgacagagtaagacgttgtctcaaaacaataaagtataatacaataaaaataaaaagaattcatcagaacaatttgacagttcctcaaaaagttaaacagttatgacatgacccagtaattccactcctaggtatataacaaacagaatggaaaacaggggcccagacatatatctgtacacaaatgttcatggtagcattatttgtaatagccaaaaggtagaaacaacccaaatgtccatccagaaataaatagataaacaattgtggcatagccaggcaacggaatattattcagccgtgaaaggaatgaagttccaatacatgatgcaatatggataaactttgtaaacatgctaattgagacaaggtggacacaaaaatcacacactgttatgatttccttgatatgcaatgtccagaataggcaaatccaaagagacagaaagatgagtcattgccaggggctgatgggagagagatgaggactgactaggtaacaggtgcagagcttccgtttggggtgatgaaggtgttctgggactgcagagtggtgatgcatgcacagcgagaatgtattaaaagccactgaattgtacattttaaagtggttaattatatgaatttcaccttgctttttttattattatttcctttttttggccttcaacttttattttgttttgttttgttttgtttgagatggattctcactctatctcccaggctggagtgcaggggcatgatctcaactcactacaacctccacctccctgggttcaagtgattctcctgcctcagcctcccaagtagctgggattataggtgcctgccaccacgcccagctaatttttgtatttttagtagagatggggtttcaccatgttggccaggctggtctcgaactcctgacctcaggtgatctgctcgccttggcctcccaaagtgctgggattacaggcgtgagccaccatgcccggcctgtcttcaacttttattttaagttcaggatgtgcaggtttgttgcataggtagatgtatgccatggtggtatgctgccaagatcatcccatcacctaggtatgaagcccagcatccattagctgttcttcctgatgctctccctcctcaccccccaacaggccccagtgtgtattttctgccctgcccccccgcccccgccatgtgtctatgcattctcatcattcaactcccacttataagtgagagcatgtggtgtttggttttctgtttctgtatgagtttgctgaggataatggcttccaactccatccatgtcccttcaaaggacatgatctcattcatttttatggctgcatggtattccatggtctatatgtagcacattttctttatccagtctatcattgatgggcatttgtgttgattccatgtctttgctattgtgaatagtgttgcaatgaacatacgcatgcatgtatctttataatagaatgatttatatccctttgggtatatgcccagtaatgggattgctaggtcatatggtatttctgcctctagatctttgaggaatcgctacgctgtcttccataagacactttttaatggggttgtttgtttttttcttgtaaatttaagttccttgtaaactctggatattagacctttgtcagatggatagactgcaaaaattgccttccattctgtaagttgtctgtttactgtgatgatagtttcttttgctgtgcagaagctcttcagtttaattagatcccatttgtcttacttttgttgcaattgcttttggcatttcatcatgaaatctttgcctgtgcctatgtcctgaatggtattgcctagattttcttctagggtttttatagttttgggttttacatttaagtctttcatccatcttgagttaatttttgtaaaaggtgtaagggaggggtccagtttcaattttctgcatatggctagccagttctaccagcaccatttattaaatagggaatcctttccccattgcttgtttttgtcaggtttgccaaagatcagatggttgtatcacctaggtttttaaaaagaaaaaaaacaattaaaaaaatcccccaggaagtttcaatgttgaaaacccaatttgctgcatctcaggggtcaggtagagccagattttcctctagcaagagaaaggacactgtgttgtccatcaagcgctggctctgccatggccctgcatccagggccatgttaaagtgtaggcatcgggggacacgcaggaggtgcggcaggggcagtgctctgtggccgctgtggatgtggtcttctccagtgcttacagcccgactgtacctctgcagctttctggctgggggatcagggtcaacgtgcttattctctctaagcctctttcccccttccataaaacaggaaaaataacaatgcttacctcactgagtcacatagaataaggtgggctaggacaagtgaggctctgagaacatgactggcccattctaagccctcaaaggattcagtttttcctgctctctgtcccacaggacactcactgagtaaaacgacaggaggaatcaccaaatatctcggtttttttcaaagtgcataccactgaatatgatgaattaaattcacgcctatcatgacttcagtcctctacaatcaaccccattttggaggctaaggctctgttaggaggagggttcaccctaaaatctgcagagtggttgagctgaacgacagtcccactttgagtccatctcacgctggacctctctggaaaaatcgtccaaaaataggttctgggtcaggctacattttccctggaaggctccaagaatggtttgcccagtgctctgatcctgaggttgcaaatctcccccagctgcagagagtgcccccaggcatgctcccctgcccagctgtgaggcagctgctcacggggctctcagaagtaccttcctcgcacctgccgcaggcccgtgtgactctctttcacgcacgcatcgtgttacagcctcgcgttcaggccctgcggctgctttcatgtgcactgctgccacgtctgcaacttgccctccttggggcccgtggcacccaccatgcaccaagcagtctgtcagcaagagccaggtgctcaaagagaagtgagctccggtgacatccaggggactgcatgaggcagacccccagggagttggtgtcgaagcctccttctcccgctcctgtccccacttccagtctgcaaccgcgctctgccaatctcatcccccaaggagcccccaaatgcatcggcattgctgtggccctgtcaccaccatctcaacccggtcagtgctgcctctccctggacagctgtccctcgatctgcgatcacttcgtagctatccattctccacgttgagtccagaaccatctatggaatcatgaatagcagccaatcacagtgagcctcactaacttccaggtgctggtctaagggcatcgtgcacattaacccatttcagcttcttttttttttttttttttttgagatggagtctcgcactgtcacccaggctggagtgcaacggcgtgatctcggctcactgcaagctccacctcccgggcccatgccattctcctccctcagcctcctgagtagctgggactacaggcacccaccagcaagcccggctacttttttgtatttttagtagagatggggtttcaccatgttagccaggatggtctcgatctcctgacctcatgatccgccctcctcggcctcccaaagtgctgggattacaggtgtgagccaccgtgcctggccttttttttttttagatggaatcttgctctgcctcccaggctggagtgcaatggcacaatctcagctcagtgcaacctccacctcccaggttcaagcgattctcctgcctcagcctccccgagtagctgggattacaggcgcctgccaccatgccaggctaaattttgtatatttagtagagatgaggtttcaccatgttggcaaagcgggtctcaaagtcctgatcaggtgatccgcctccctcagccacccaaagtgctgggattacaggcatgagccaccgcacccggcccatttcagcttcttaaccaacccatggcggatggtacagaagaggaaactgagacccatacaataaataacgtgctttaagtcccatatctcaaaagtggtagtagcaagacgtgaacccaaatcgtcagattccaaaccacctactgtgaaccacacaccatgcgcgcagaatgtctggggctctctttgcatccatgtccagctaaagtggctttgcaggggcaagatctgtgtttccaaggatccttctttcaggggcttcaggttagtttttgcaaggagaggttcttgtgagaaacctggacagtggaagaaaagaaggagctgctgatctccgaggcagctgcagccaggcccacaggagacctgaggattcccaggggcttcccagtgatctcctgacaaccacacacccagagcttcttcttgagccctctgtgaagcaggccatgatctttcctggcaacatctccatccttcactacctttgctcctgcaaaagcccccaattcctcgattaaaccccacaaacttggagtacctagagtagcttctatttcctaagctctgatccactgccatccactattgatgcctgaggcatactgatcatttcaacccccacctcacgattgctcttagacaaggaccaacacccgcaccagtcctgcaggtgctacttgcaccgctccacggtcctctccagtctcctctccccatttcctgtcctgttcccgatacctctctgctgtccagcctcacccacttctgaggtcaccatccttccttggaacatctgcacctgcagtaccttttgcctggaactctcttctctgccactcagaccaggtaacttctcatctgtcagacttcagctcagacatcacctcctccatggagccatccctgattccccaagggggaattcctcaagggatgccctcgaggtttagggcactggtcacattgttatttgtgtggttgtgatatggtttggctgtgtccccacccaaatctcatgttgaattgtattaagataattaatagttcccataatccccatgtgtcacgggagggacctggtgggaggtaattgaattgtggggtggttaccctcatgctcttctcatgatagtgagcgagttctcacaagagctgatggctttgtaaggggctttccccacttttgctcagcacttctccttgctgctgccatgtgaagaagtatgtgtttgcttccccttccgccatgattgtcagtttcctgaggccttcccagacatgctgaactgagggtcaattaaacctcttttctttataaattacccagtctcggccaggcgtgatgtctcacgcctgtaatcccagcactttaggaggctgaggtgggtggatcacctgtggtcaggagttcaagcctgaccaacatggtgaaaccccatctctactaaaaatacaaaattacccgggtgtggtggcgcatgcctataatcccagctactctggaggctgagtcaggagaatcactcgaacccaggaggtggaggttgcagtgagccgagatcacgcattgcactccagcctaggcaacaagagtaaaaccccatctcaaaaaaaaaaattacccagtcttgtgtatgtttttattagcagcataagaacagactaatacaggctgattctcgagactgtaacttcaggagagcaggaccatgcctgttggctgtccatggcatccccagcccagagcagtgcccacccccaaagattcttattaagtaaccactgcgtaaggaacagccctgggggaagactgggcctagataaccctgagacaggcagtcctcaccatacatgatgcctatagggacagaggagaaggtgtgagattgctcccagccaggaaacacagggcgtcacaatgaccccagctttggagaaatacagggatggggcagccggggacacagtgggagaggctgagagagcactgtgtcttctggccaggcaggaagctggatatggaggtaggcctgcgggaagaaggttaagtaccaacatgtattcttttgtctgtaaaacagacccactctcttcatcaggggaactgctttttcccagtatgctttcccaccatggtcctggtacagctgctgatccctgtgaccagatctcctggctatggtgtggggcacaagactcacagcctcatgcccttggccaccatggttttgggtctttacaaaggtattttaatgatgcagggaaaagtttacactacttaagtgaagcagcaacacatacaattctatgagtacaatgacctcaattgtataaaaatatctatagtgcatttaaaagcgctagaaggaaatatggcttcctctgagtgtgagattgtgggcaattttttcctctatattttccaatatgtcatgcgttaccctataaccccggaagaaaacattgctaaaaggggggaaccacacctgaatagcctcttaagaagagcgttctgcccacaggttgccacggggctgcaagcgaggcagctgttgaaggggtgacagccagagctcctcgggccactgccgtgacaacagaaagggagaaggtgaacactatgagagatttctaagaaagatctttgtacaggacatttgatggttttgtcttctcttctcagaatgttaatcttttctttcttctaggacttttcctcagagactataaactgaatgcttgtacccccagtgtgatgggatttggagatgaagcttttgggggatgaccagggttagatgtcaggaggccctggtctgatgtgatgggagtggtgcccttcttagcagggacaccgaccagagcgtttgctcgttgatgccctacctccgtgcacaccgaggaaaggctgtgtgagccacagtgagaaggcggccatctgtaagccaggaagagggcctgcgccagaacctgaccatcttgacacctggaccttggacttccagcctccagaatggtgaaaatatatatttctgttgtttaagccacccagtttacggtattttgctacagcagccgaagtaggctaatacagagacccccacccaaccctgcaactctctccacatagtccggtggggctgagcctggctctgtccacgggtgaactgggcagagagtattgcatcctcccacccccacgagcagggatggacaagcctgggtcaaagatggctcaaggatggacacctgacccaggccaagttcatcagagtcaataccactcagtcccagaattccttttggaagtcttttgagaggcaactctctctgctggggttattaggagctttggacatacctggagctccagaccaccatctttctgggaaagtgcctgcctgaaaaggagacaacacagagaaaggcactatttgaacacctggacacagccttgcctgaatgaagccatctactctgcacatttcagttacatgagctaatgtttatttttctgttgggctggtttgattaggttttctgtcacttgcaacctagagtctcactcatacccaaaggcaaaacacacatagttgcttttgaagttgctccagtagccacacctcccagatttgcccttggtgttctgcagatggctgtgagctggccctcctgcccaacaagtcaggctcctttggggggcctggggcaaatcatcacagctgcccaaattcactccccaacacctgctactctttcttcttcctctcctcctcctctccccttacattcttccccctcttcttctctgtagagcctgtcttctctcttgagggagacttgcagacaagttgaatctgagtgtacaatctagagccagacatccaggataccataaacatcagacatcaagtattccagctgcgtgacctaagcagatttcttaacctctctgagactcagacttttttccataaatggggataacaattcctactcatggtcgggcatgtggctcatgcctgtaatcccagcactttgggaggcagaggcgggcagattacttgaggtcaggagttcaaaaccagcctggccaatatgctgaaaccccatttctactaaaaatacaaaaatcagccaggtgtggtggcaggtgcctgtaatcccagctactcaggaggctgaggcacaagaatcacttgaacatgggaggcagaggttgcagtgagctgagatggcacctctgcactccagcctgaatgacagagtgagacttcatctcaaaactaataataataattcctattcatgaagagtttaagtcatgcacgtgtgcctggcccatagggaggactcattaacattgactactattgcaaatctttaccttctctccccagtacacagcctaagtctaccactgatgctcatagctacgggtgaccttgagcactaaagaggctaccagaccttggcctgctccttggaagtcgccgtgaggttatttgcagactctgttagtcgatgacttaattcttcaaacagggcccaccccaatgaaatgcctgcctgctcagcctgttttaaagaatatttaccaccattggcaaggttcaaagcaaggaccagttaatgactatccctaatgggccttcaatctaaggcaagtttcatcttgctatgcaaggaatggagcttcccttaggtgaggttgcagcaaacagcctcgccttgcaaggagcagtttggcttaaggaataggaagctcatgggagccacactgtctgtgtcctgggtccccaggctcagcactcttacagcagaaatatgcagtcaatgtatggacatttgctacagggcactaataagtcccatcatgaatttagcctgttaattaattggaatcacatgcccaccctcaaccatcactgggaatgctaccggtttgtgatatatattattgaagatttttctattcacacaacactcttcaaaaatcctgctatttgtgtaaaatgttgaacaccacatgacactgaggtctcatcccagcccacgtccttgcataactgaagattcccttgaaatggcaggcgagttggttcaagatgtttggaagtcactggggtatatagggcctggagctggtccttctgtaagaaaagggatctgagtggtggaattgaagcaccttgtctgcatttgacgtttttgtgaagtgcactgcatagcatcattatctgtgcaattgtctcctcttccaggctgaactgtaagcttctggagggcaggatgggtctcctctgaggccccgtatgcttaccagctgagtactttggcgagcttctttcatttcctcatctgctaattggcatcctaatggttcctgcttcatcagctgccgaagcgtttagtgactgctgccttcatccaggctgtgtcctgcagggtgtctgagtgcttgacatgcgtgacctcatttaatctgggcaataccccaatgagatgggtactcctattatccccatttagaaatgtggaaactgacacagagggaacctaaacaacttgcccaaggtcacagatctaccaagtgctgcggccagaaatgaacccaggcagttggtcactggagcccagctttctgacccacatcccactgctccctggttcaatgtagaacagatgtggagatgtcccatggcctctgcacccagccgtccatcaatggtagccatctggccattatttatgtcctctacagtactcaacacatatcataggttgtccaataatttaatatttagtgaatggcttagtgccactattcaccaaatcttgattgagttcctacaaggcaccagacaactcactattctagacacagggaaggaagcagcaaaagacttgcaaagcctctgtccccctgaagctgccactgccggcagcacccggagagtcagatgtaacatcagacatcatcacatcatgtcagaaggtgataggaagaaacataaagcagcccaaagggaaagacatggacaggagttgaaaggggaagaatttacggtttgtttgaaatgtgttatgttttaaagtgggaggaggagtgagaaaagccccaaagggaatgtatttgcgagtttgtcatactttggtaaaattaaataccaccacacagcagtgaaaattatactagggttttgaaatggcaaccgaaagagatggctgatgaggttgcactgggggttggagtgcttataccacatctactcgccccagctgttggagcctagggctcaacgtgaggaccaaggccaggaccctgcagggactccccacatccccctcaccagcagcttagctgactcagcaaggggcctcttggatgtgtcttttgcctatttttgggtgagtggtaaaaagatcagcacagcctagtatgtgaagtcgttcatctgtgaccagcacataagaacccataaccccaagatggaatctcagcagggtcacagtggggatgctgtacccctgggaacggcagccagacagccggacacagtgagaagctgacccatacggcagttcacaagcatgtgatgatagggacagcttccctcgttgcatgtattatgcaaaagagggtgggagtttcagtgttgcagataaatggataagaagaaaagggaaacaggtctctgtgcaattatctccaacactgagtcacaagccacacaagtcccttgcttgctggaggctgtgacctgtgggctgatggccctggttggtgacctcagatgctgcctctcggcttctctgtcttcttcgaagattcccaagatttcagtggcgacttcattagcgtccagctccagtgctccagggggattcagctgtgcagtgtccagcttgaagttggctaaggaaatctgcatggagagccagagctgggatttaaaagcaacagaaacagcagtttctgactcagggcttccccttgggctgtggataatgttaagatggtcgaggatctcaccaggggttccctcccccagttcaggtacctcaccctccccttcacaaactgatgggttgaaaagactctccaagagggtaggggctatccccaccatttgctgttccagtgatcaaggtccttttgagctggcaccaagactgcctgcagaagtcataagaggaaactgacagaaacatagcaagaaagtccagagtgttcagaaatcatcaaaacacccccaaggaagttggatttcatgtgcaactaacaggccccctcttcgtacgccctgccctgaagacggaagtgtcagctgccatagctgagtccctaagaacgcgtcatgtttgtccttttgcctctaaaagctgagcatgtggctcacttggctgtccccaaaagaaatccttcttgacaagaacattctaattctattagtgaggggtttgagccaggggttcttggctcttccttgtctcactgggggagtgcaccaggaccagccatgacacagtgaggcagagggctgaggccagcgctgggctctctaggagctggtggggctccacgcagcaggatttgttgatgacatgaaaatgctccccaccaccccacaaaggaagcatcagggctcgtgtcctaggagaaaccctctgaataagacgaataagctctgcagtgtctaagcctggcctggatttaagtcctggctccaccacattcttgctgcagacccttgggcaagttccttaacctctctgagcctcagtttcctggtgtttaaaatggagataataatagtactgacctcatatgacctttatgaggactcgtgggataatgcccattgaactccagccagagcctttcctgttgtaagtgcctctaaccgaccattagccttactcagtcaccacagtgaggggcttccatgttctagcgactgcgcagctgtcatttatcaagctctcagtggcactaggaactgtgcaaagtgcttcatacacattgtcacctcatttaattctttttattttttgagatagggtctccttctgttgccaaggctggagtgcagtggtgccccagctcactgcagccttgaccttccaggctcaagcagtcctcctgcctcagcctccagagtagctgggactaccagctcacaccaccatgcctggttaatttgggggggagtatttttggtacagatgggcaaccatgttgcccaggctggtctcaaactcctgggctcaagcaatctacccacctcgacttcccaaagtgctaagattacaggcatgagccacccggcctggctgcctcccttaattcttacaaggaatcatgatgtaggactgttatacatcagtcagaatgaatctaacagtagatcacagatcatgcattaagtggattggacaataaggacaatgtatcttctcccggaatgtgatgtcccatgtccatgcagtcccagctgagaccagtgtccccataaactcttcagggacccaggctctttccatctctgtgctcccccatctatgccaccagctggagccctcatggtaacagggtgctgctgcagttccaggtaccacatacggtctggacgacatgctggtggaaggtgtctgctcctggatgtctctttcttagggagtgagcctttctccgaagcccgtggtacacaggccctcaggtctcgtctgctgggattggggcatatgcctcgactcggcccggcccacagttcactagaaagaaattagccagagtactcatcttccatggtgggagttggattgactttgctggagaaaaaagaatggggaaaggcagcagtagatttagttttccaaaatgcacactcacattctaccagttgagcacagagagatgaagagcgtgtccagtgtgacattgccgggaggtggcagctggagtgactcacagccgcaacacacagcctgaccactatcttcctcacctttcctacctggagtattcaagaaatccttccctccctgaaagtcatattccaacattttctttttgaagttttggttttcatagacagaagaagtccttccttccccaagagtcatattttccaacatgttctttttgaagttttggttttcatacacaggtgtttaatccatcctgaattgagtgttgagtatgatatatggctggaatcaatttttgtaaggtatggaaaaatagttgtcccagcattattttttgaaggacccattcttttcccttgtcctcaaggccacctgagtcactgagcaagtttccgttctgtttcattcatctctttctcgatcactatttcaatatcagcctctctcaataactagagctttgtaaacaactcgatgtctggtgcaccctcccttcatgttcttctccaaattgcctaaattattcttcgcctttgtttttccatatgagttttggaatcagtttgttaagttccactgggaatgcaacatcctggctggcccaggatgtgccgtggtgtttacaactaattgatcacagccggttacagatttatttgttccttccccactcccaccgcttcacttgaccggacttaaaaagagaaatgcaacatctaaaagtaattgctgcaatttcagtgaacttcagtaaatgtggatacattcttatctttataatattgagtcctacatccatgaatatggccatgtagctccacttattctgatcttctttcatgtccttaaataatgtttcgtgattccctccatacaggtatcatcaatattttcttagctatgttccaaagacccacattggcttgaatagaaccttaacaattgtgtgatccagtggccctacttacaggtgggagacctagacggcagttggctctcagtagaagattccatccaagtgcccacaggaatggtggtgagtcactgggagctgtgggcatgagaggcaggggtagtgagggtgcagaggacctcatggacaacgtcatccccaggaacgagcaacactcatcaaggcagaggatgggaggcggcattcgaggtgagggtgcaagggtctggcgtgggagatcacaggcaatggatgataagtgtgtggcattctcaaactctagggaggcaaaactgagttgacagttaaaatccaggattgtgaaagggggtgaatgtaacctttggccaatacagacagatctttttatcaaactgatggaaatggacagacaaaagatgtgaacagagtttgagcatgtgctcacagtgatgagcattgtcatcacaactgaaagacaaaaagcaataataataataatagcaatcatgatggctaatgtttacgagcacttaatatgtgctaggacctgttctaagcttcttgcatgtatgaactcacttagtcctcataataatcttgaggtgggtaccttaccatcagcatcttacagatagagaaactgagacccaagaagatggagaacttgcccaaggctaccagctggtaagaggcagaactcaggtgtgaatcaggcacactggctgcagattctatgccattaaccaccaggaaccaaagtgagttttctgtaactgggaatgggagttaatctcagggactctcgagactgctggtctcgtctgctgggattggggcatatgggattgaggcctaaaccgatcttttgaaagacatactgaactgactccccatcaaacgtggtagaaataaaagcggctgatcactggaagcccagtgattgtaggacaatcatcccagaggtctccaatcagaggtttggtgactactcccctcttccctctattttctttcctgaagttatcctgtctcaacaagatgctaacgagttaactgagaaggtctgaattgctgatctttggctctccttccagacacctgtgacttgctttggccaagcaaaaatgtgcatggaagtgacaggtgtcactgtgtgacataccactctccctttcccctgatgttgtgactgcaaaagtacaagtagaagtggaggctgcctcaccctgggtctcagagccgatagtgcttcttaacccacttgctcaatagaagagctggcattagcagacaaactcgagtgacaggaaacgtgcagggatgcagagtgtcactgggataatcgagttcaaggggttgcccagctgccagcaccacctccatatgtagggctaataaaataattacaaaacacatggatatggttttcaaggtagtcagaagaaagcagtatgggtgatggaaaggacactgctacccccaaacagaagctccgggcatgattcccacctgtgccactaaatcaggcagcatggaactttatttaaagactggtgggctgagcacttgcatagggcacatggagggaaattcgcagagcccttacaacaagaccataaccaaacctaccagacccattgaactctgtttttattcagcagcaaatcaggagttccaaagacgccagtaacaagggtttctactttaagaacccccaaactctttgaagctgagtcaagggaagtgggaaacaaagtcatagacatacaaaatttcttgtggaccccattacatgaagctcacacctcttttgcttctcctgattacaaaacaacctctaacttataaaataatttaagtatctcagaaatatggaatgcagaaggtgaagtccccacaatctaacctactaatgtggtatgtgacataaccagctttttcagccgacgtacctccgggcaatatggtggttctgttaccagctgtagagttttccactgcagtcacagggagaattgattgagtcaattttgtattgtatcagcgaatatttgagtgttggcaatttttttgcttttccaaatagtgaagcatgaataatattgtgccaacttcgatggaccccaaacactttagaagagatgtttggtgcctccagagtcctcagaaatgatggtttctaccactgatggagcactcaccacatgtctttacatagttgatgcatttagccctcaaccctatgaggtaggaatggtcattattcccacttcacagatgagaaaactgaagctcagagaggctgagaaacatgctcagggggcacagagccagtaagtggtggggctgagacccgaacccaggcatctgtagaggaagcccctgcactcttctatgtgattgttgcagccatttggagaaaaggcaaggagtgggtggagagtgacagacagaaaccagggagaggttagggacaagcctggacagaagtaaaagcattcacaggaggaaaacattaaagtttgccttcttttctgggctggaaaaacagaatgcaataaactattaggcaataaggcaatggcttgcattatgtccccattaaggagcttcataaagtcacagcagaggaaggcagagcctgctgacttgctgaggggtcctgggcacagtgacaatggaaattcatgcctcttttgcaatgctctggatgtacaggtcagcaaagaggtagaacagccttgtggttagtgtttcagcctgcagatctggataaccagggcctcagcttttcctgaagcctagcagcaccttggaaagtatgatcacctccagattcctcctctgttcaatagggattccaacaatgcttgtgaccataagaaggcgtatgtgcctcccttggcaccatgcctggtgcccaagaactagagatacttttattattttctgccactgttgctcttccctctgaaatgctcaccaggccctgtctccacttctgtgcttagacatagtgaccctgccctcttggtactaagcggctgggttggagggcccctcagaggtaggtcaagaggttggctctgcccactcacttgctgtgtgaccttgggcaactgtctcgacccctctgagcctcagtttccttatatggaaaatgggggtcatatagacctacatcccccataaggttgagacaaggatcaaatgagtaaatgcacgaatagctcttagcatggcagctggcacgtggtcagtaccctttgatattaactgctcatactgctcttgattcatttgactaacacttatttgaatgcatattgaatgccaggcagtgttctaaatattgcaggcaaaccagtgaacaaaaccagacaaagtcctgccctcaggaagaccttattctagggggaagcgaggggacaacagctaaatatccataccgtcaggtggggagcagcataggaaaggcattaaaacagggtgggactgcttatttagggtgactaagaaaggaggtgacactgagctagtcactcatgtttttggctctcctctcagacacctgtgacttgctttggccaacaaagcgtgcatggaagtgacaggtgtcactgtgtgacttgccacactccctttcccctgatgctgtgaccatgaaagtgcagatgagtctgtggcaacttgggtctcagaaccccctagaatgaggttggaggtgttgtgtgtgtgagagataaacatttggtgtgtcggggcatggaggacttggggttgtttgctgctgcagcaaaacagagtctgatacaagtcctgtgttttaaggtagcacttgagcagaaacctaatggaagtgagggccaaaaagccacggggctggggtggggaaggtgtcacggggctggggtggggagggtgtcacagggctggggtggggagggcatcacaggctgcgggaacagcaggtgcgcaggccctgagacacaagcatacctggtgtccttgaggaccaccgaggaggcctgtatggctggagctcaagcagaggagatgtcatgagagaatcacatgtgtaccggggagaaagggacccgataaactcctcaggctgttgcaaggttgattgtaatgattattggtattggggaggggaatctccaagccaaccagtccctctcctcccagacctgtttccagtactgcattttattttattatatatatgtatataaatatatatatataatatatatgtaaaatagagtctcgctctgtcacccaggctggagtgcaatggcgcaatcttggctcattgcaacctctgccttccgggttcatgccattctcctgcctcagccttccgagtagctgggactataggcgcccacaaccacgcccggctaattttttgtatttttagtaaagacagggtttcaccgtgttagccaggatggtctcgatctcctgacctcacgatccgcccgcctcggcctcccaaagccaatactgcattttaaaaacagcaagaggaaaatgtaagtgtcagtgtgcacccccaccacccctacaggctggggcatcctgggcaatcccccagccccagtggacccatggctccagggggccttgtccttgctggctagggaacccaggtggcttcatgcttggctgcaggcctcgtttgtttggggctcagacagactttccgagccacgtctgtttacgaaggtgactcttgcatgtgcctcccagggctgctccgtttgtccaagcatctgttcagctgattttctctatttatttctccagtaaacaaccaggtcaaaggcagggctctgtcatagttccacaagtcccgctgcctgtgccaagacctaataggatgcagagataggggggtgacctgaacacagcagagcgcgacactctggaatctccaaactgtgtctgagtgcaggcacccacggcacccagaggtgtggaccaagctggccattctcaggggcatctgctgctttggccgccagcatctgcttcctctcttgctgcaggtggcaccccagtgaccccataaaggaccactctccactttcacagtccagggggtttcagggtgggcctggagccctctgccccacttgcctcctggaggaagtgcatggcctaggcccagccattaaatgtattctccccacagctgcccaccttttgtgattggcttcacagtgaccttgtgacccagctgggccaaggcatgtcatctccaagagttttacgagacccattgagagaaaggtgggggtctttctgcctggatcactgggatggcagggtgaaggcaagagctgctggcgaccatcctggccaccgtgtggggagccctcctgaaaacgcagacatacagaagagggcgaagggcagggatggaaggacacaggtttccgaaagtaatagttgagttcctggatccagctcaccctgaagtccctggatttggaggataagtactttgttctggtttcccgtcccctgcaatcaacagggcctgactgactcacatacacacatcagttgatagacggataaatgtaaggaagtgggctgcggtggtggaacaaaaactcggcaggatggaacctgcgagaaggcgagtgtgtggcggagggccaggcggtctgagagtcacacatttctggcggcttcccgcctccctcagcataaaagccaaagtcctcaccacagcaatcagtccctcccaagcctcatctccgccttctgccccttgtgccccctgtcctagccacacaacttctatatttgttttctatgctgtgtaacaaactgccccagatttagcagcttaaaacaacacctgtttataagttcacggttctgtaggtcacaagtctagtgcagtgcgtctgggttctctgctcaggctgaaattacatattgccagctgtgctcttaccaggagcttgagttctcttctgcgctcatttctctaactgcaggatccaggtccttgtggttacaggacgatagtccccatttccttggtggctttcagccaggggcagctctcagcacctggagaggccacctgcattccttgtctcatggcttcctctatcttcagccagcaagggcccctggaatccttttcgtgcttccaaacactctgacctctcctgcaccagccagagaggatcctctgctcttaaagggcccctctgattagattagggccatgaggatcattttcatatcctaagatcaactgacttgggactttcatttcaactgcaaacccttcgcagcagcacctggattcctgtttggttgaataatcggagaatgagaatctggagccagctctagagttttgcctaccatggctgccttggtattcctcaaacgccccaatcatgccaccatgcaggccttgtgcgtgctgttctctctgccaaaaaggttctgcctgcagctggccacgtggttcgcaccctcactacgtcccttcctgtacaaatgtccaggtctctgtccaaatgtcccttcctcgagaagcctcccttgacctccttacataaacatcaccctacagcccctttacctgcttgatttttctcccagagcttatgtgatgttacaaatctatttgctgtctccccacactggaccagaagccctgggaacagggactttattttgttcacagagtctggcacaaataagtatttgctgactgaaagaatgaatgtagttcttcaatttcttggcagtctcagtagtcaccctggggtctttcccatgtttatttgtcagcccctggccccagggagagagagtgaagctcagatggagaacctaggcattggaaacagactgcctggcttcatgtcttatgggccagccctttacttctcaaagtctgtttcttcctctgcaaaatggggatcatatggccgggcacggcggcttacgcctgtaatcccagcactttgggaggccaaggtggatggatcacgaggtcaggagtttgagaccagcctggtcaacatggtgaaaccccgtctctactaaaatacaaaaattagccgggcgtggtggcgggcgcctgtagtcccagctactcaggaggctgaggcaggagaatcgcttgaagccaggaggcggaggttgcagtgagctaagatcgtgccattgcactccagcctgggcaatagagtgagactctgtctcaaaaaaaaaaaaaaaaaaaaaaggatcgtatcagtatgaacctcacaaggtgtctgcaagtgctaaataacataatccagataaagtatctggcatccaaatcaaaaccataaggtgacattgtgtcatacccaccaaatgggcaaaaagtaagaaattatcagggcttggcaagaatggtgtggtgaaaactcttccattggagtgtgcgttggttcaactgccttagagattcagttggcaaactccaatggaggtgaagatgtgtgtatcctacgtcctgcccagaagacaaacacaggaatcttcatcacagcattgctggcaactgcatctaccgatccacatactgcttacatcaaggagatctcacaatgctcactcacagatgccactagcaacaatacggcttcaaccagctgactactaggcactagagcaagcactttacataaataatcccatttcatctttattcccattttacaggtgagaaaatggaggctcagagaaggataaatcacttcctcaagatcaaacacttgggaagaggcaaagttctcattggcatctaggactacagggggaacgggggagagagaaaggagaaggggaaatggcagagcaaacaaaatgccagcatccacaagcctcagagtgctctcttctgtaaaaagctcaacaccgagctcaccatgtgacccagcaattccacgcctaggtgtctacccaggagaaataaaaacatgtatccacactgcaacttgtacctgaatgtccacagcagcattatttataataacccaaaactggaaacaacccgtgtccagcaactgatgaacagatgaactacatgtggtctctccatgcagtggaatagcatttgaccataacaaggaatgaaacacagatctatgctgcgtggcagtatcttgaaaacactacactcagtgagagaagtcaatcacaaaaggccacatactgtatgactccatttatgtgaaatgtccggaacagacatattcatagacagaaagtagatgagtggcttccaagggctgggggaagggagaatgaggtgagactactaataagtacagagtttcttttgggggagacaaaatgttccaaaattagattgtgaggatgattgcacaactttttcaatacaccaaaacccattgaattgtatactttaaaagaatgaattttatgatgcgtgaattagatctcaataaagatgattttaaaatgttttctgaggggctgggtgcagtggctcatgcctgtaatcccagcactttgggagggtgagctgggtggatcacctgaggccagaagttcaagaccagcctggccaacatggtgaaaccctgtctctactaaaaatacaaaaattagccaggtgtggtggtgcacgtctggattcccagctactcgggaggctcaggtacgagtattgcttgaaccccggagatggaggttacagtgagacgagatcacgccactgcactccagcctgggggacagagcaacactccatctcaataaataaataaataaatgttttctgaggatccctggttttcagagtgttcagggagttggtgggggtgggggacgtgtcatgaaaatataagtttagtgaatgcaggctaagcaagtccagcaacagttttgatacaggtcttctcagagactttaatttgtggatataactagtgatactcccaaaaggagtatgtactaataccagataatgcttattgagtattcgcagtgttctagtcatctattagcttatttatatgtatattaactaatttactcctcacattagccctctgagatggaccctattattccactttagaaatggaaaaactggggcacagagaggttgagaatcctgcccaagatcacacagctaacaagaggcaaagccaagatctgaacttaaatagccttgctctgggattcacgctagactgcttatcttggtacagtgtacaacatttccaaaacaggtttgaccatagcttacttgaataggaacaatctcaaaggatctgccttctctccatccttgaggtctgcctcctggatctagaagcatctctcactgagacaagtgcaacatcttccccatctccttacctccactctccctccccacactgcactctccttttttaacacacacgacatccttcccttgcttcagaccctctgatggcctcccaccactcttagaccagcgtttctcaacctcagcactatcaatatctgggactgatgagttctctgtggtaggggctgtcctgtgctttgcaggacataggcagcatccctggccccttcccactagatgccaggagcaactgcccccaaatgggtggcaaccaaaaatgtctcccaacattgccaaatgtcctttgaggggcaaaatcgcccccactggaatcactgccttagaacagagtcctgtttcctcactgtggccgatagacgtccccgctcatctctccatcaacgttggcctgctctctgccctttaagttctcccagtgaatctctccgcagggcctttgcatagctcctcgctccctctgcctggagctcgtcccctcagatcttcttcatagctaaggctttagctccaaggccctcacctgagacaggtttcttctgccctcctctctcccaccttcattgcactttcctgcccagtcacccactttcctaccacacagattgtttttccctctaacacactgtgattgaacttaaattgtgtattttttttccttctttgtttttctttagacatggggtctccttctgtcacccaagctggaatgcagtgacttgatcatagctcactgcagcctcaacctcccgggctccagtgatcctcctgcctcagcctcccaagtagctaggactactggcatgagccacaatgtccagctaattttttaaaaaaatgttttgcagagatggggtctcaatgtgttgcccagcctggtctcaaactcctgggctcaagtgatcttcctgcctcagcctcccaaaacgatgggattacaggcatgagccactgttcctggactttttttttttttaatctgccttccccagcaatgtgtgtgcaggaacttggtgatgccaagcttggttgaatctccagtactaagaagggccctgggaaccatgaaggtgcttaaaccatttgttggatgaatcataagcctgccaatgtgtaaattgggcagcccttctggtgtgtgcctaggagtggaagagacagagatgtggaaaggaaaacaccttttggggtttcatcgccttgggtttgaacactggacatgccttctggtcctttgcaaaagtgcctctttctcccaaaaccagttgccaagaagtcttaaaaaatggaaaacaaacaataaaaaagaaaacgaagaagcgaagggagagaaggaaaattacttcagttttaaaagtctccttaaatcagagcaagtctctgtttaatgttgactgattttcaaataaagcagagatgaggttttggagctagctggaaaacacttgtgatggggtgtctctaggtcagggcctcaggattccaaccaagggggagggtggaggagagcaattagcagctcagcgagggtgtgaggaggaaagaaataaagagcagagaggatgagtcaggctgggctgtggcacaaagccaccctgcgtgctaacaagcagaaagcgaaccaggtcggggaacctcccctgcaaatccccagggcgactcagtgcagcagagggaagctgctttttctaaagccctcctcagctttctccatctgggtctgtagtctgtgaagggattttgcaggctgcagagattttgctcagcatgacttatcctcccgggcttggctgctacttcagtgaatgagaggctgagattgaggctagctctgaagttctcaacctggaagccccagccagaggagttctggaaggttacaatggaggttctaaatattttaaacctaggccgggcacggtggctcatgcctgtaatcctagcactttgggaggccaaggtgggcggatcacctgaggtcaggagttcaagaccagcctggccaacatggcgaaaccccatctctactaaaaatacaaaaattagctgggcatggtggtgggtacctgtaatctcagctactcaggaagctgaggcaggagaatcacttgagcccgggaggcggaggttgcagtgagctggagatcacaccactgcactccagcctgggcgacagagcaggactctgcctaaaaataaaaaataaatatttcaaaccacctacgaaatatttttatgaaaaaaaaatcaaaccagaaacagttaagcctccaaattcaactctcaatttataagaaatacctgaaacagaaaaacatagtaaattatatcacagggatgcaatccccaaactcctaattgcacaaaactctctgggactaatgactcagtttcttcaacaagtaaattgcaaggaaagaaaactggagaagaacctatagaatttaggagacttaagagtcatatcaaccaacagccatgtgtggatggaccttattcgcatcttgatgaaaacaaactaaacaaacataacaaatgccgcatggtctcgcttatatgtgaaatctaaaaaagccaaactcatagaagtgggagtagcatggtaagcaacagagtgggggctaggggactggggagataggggtcaaaagatataaaattccagttagacaggctgaataaggtcaagagatctactgtacaacatggtgcctaggtagttcatgacaagctattgtattcttgaaaatcgctgagagtacattttaggactacctgtgtgtgttctcaccacaaaaaaatgataagtatgtgagctaaggtgtatgttcattagcatgatttagctaatcaagctaaatatggatacagatttcaaaacaacatgttgtataggatagatatacacaatttttatttgtcaattaaaatagataacttttttaaatgagaagaaaacaattgctgaaacaattggggcaatttcaacagatagaatacttggtgatataaagaatgattgttaacataccttttagtatgataatggaattataatgtgtttaagagtcctttttttttttagaaacatgctgaaacacttattaataaaataatatgattcttgggattggtttcaaaataatctggtgtgagggtaggtaagggggtggatgtgggtgacaaaatgttggccatgagttgacagtcatggaagctggtgttgggtccacggtagtgcatgacagcactctctaaaaataagtgaacatcctgcttttgttaataagatgacccataggcttgcaaatattttggtgatcttcttaacattagatttcattttattcacaccaggatatgatctgctttacatcacacatcctggtacatgatcactagctacaacaacaagcaaattaattcatcaatactaagttgccttgactttgaggcaatatcgtatagcggcttagatcaaagaaacccttcctgtcagcaccttatcacttgcatctctatgaaacccagcaatttttatacttcttggtactcaactttctctgctgtaaaatgggagggggtaaatgagattttatgcatgaagcactgggcccagtgtctgaccgtcagcgaaccttagttcctattattaccagaagcagcaataccagtctgcagagtgaagtcttactctggacacgttgctaatttgggcatgaatagaaaaatgcctgggataaaatacaaggaataggtaacagaggtaaccccatgaggagtcactcattcaatcattccatgtgccacgtggagctgtgggcacatggtaaccaggagtcaagacacaggggtgtagcccaggaagatgttcagagggcgatctgaaggctgcaggagagttagccaggttggatttgggaggggaagggaggggagtagggaaagaaaaaggacaaggggtcccaagctgttaagggaaaggcaagtgcaaaggccttagagcaggaaggaacaattccaagatgcaaaggttgcagcgagaagagcagaccagaccagaagcagtggctcacacctgtaattcgaacacattgggagactgaggcaggaggattgcttgagcccaggaggtcaaggctgcagtgagctttgatggcgccactgcactctagcttgggtgacagagggagatcctatctcaaaaaaaaaaaaaagaaagaaaaaaaaaaaggaggacccaagaaggtggagccagtgcagctgcagtgatggggagcggggaggtctctttctctttcgctcacatctcacacacttctgaattatgtcaatatcttatgagaagcatgtagcagtctcacaattttcgaaagctaaaaaatgcaaaggaaaaatggctataaaccctcaagaagtaaagaaaatattatggccttttctctacttcttgtctaacaagaagctaccatatatttttcttttttctttttttttttttgagacaggttctgctctgtggcccaggctggagagcagtggcgtgaatctcagctcactctaacctccgcctccaggactcaagtgatccttccacctcaggccaccacacctggctaatttttgtattttttgtagagacatggtttcaccatgttgcccaggctggtctcaaactcctaagttcaagtgatctgctcacctcggcctcccaaagtgccgggattacaggcctgagccaccgcgccctgccatgaatctacaaaatgttaaaattcacttacatttgctagataagccaccttgtttaaatgtaagaagtatgctatcctctcctgtctggtttgttgaaagggcctccccatccttgcctcccttctttcccttttttggatgtgttagaggtggaacagatctttgcacctaatttaaacaatactcctttccagcctgcacaaagattttggccctctactgtgtttctgggactgagtatgagtttggaggaaacaccggctagtagggtttgcggggaagcttcctggcccatagggagaactcagtattgagactgtcctgcaagttggcatttgtcagtttcatttgcaatgtgttgctaggagcagaatatgtttttctggttcttgctcacagcctggggctgggactgttgactttgatgtgaaggtggtgcacacagctgctgggggagggcctatgagtcctgccgtggagcaggatacctgcagggcacaggcagagcctagctgctggagggtgagctgcccctcctgcttttgtcagcgcagtgggaaccccagccaagtcctttcaagtcgcaccttgcactttgcggtttctcctcttaggaatgccaggtttattacgggtttgctcacttcacttcactgttctgatcctctccttgtgcccccacccagctcaggacctttcattctgtgtcaggtctagcaaggctgctggcttctggttgagtctaatgctaagtgataccaaaggctctgtcctcaggggacagggaaaagtggacagaaatgtttctagtcccaggggagaggcaccttccagcagacaagccttgacagtgtcattgacctcctggcctgcaagatcctttcatttgtttgttcctctttggggatgacgcatgagaacccacctgccgcacaccctcatttgaaagatgagaaaactaagaccaccaccaaagcccccagagaacgatgacacactccaagccagacccccacagatgcctcatatccaagtggttaagagcatgaatttggagtcaaggtttaactctcagctctgtcacttactggaggtccaatcttacacaaaagggttaatttctccaaacctcagtttcttcatatgtgaattgggtgtactatttttcacctcttaaagtcactgatttattttcagtgcatttcttaccctgccaacttaattatgtaagagttcatctggccaggtgcagtggctcacgcccataatcccagcactttgggagggtgaggaggatggatcacctgaggtcaggagttcgagaccagcctggccaacatggtgaaaccccatctctactaaaaaatacaaaaacctagccgggtgcgatggcacttgcctgtaatcccagctactcaggaggctgaggcaggagaattacttgaacccaggaggcggagattgcagtgagccgagattgtgccactgcactccagcctgggaaacaagagcgaaactccatctcaaaaaaaaaaaaaaaagttcacctgattgcctttagttctcccctccttttaggctccgagctccctaagaggaaggggtttacctgccttgttcacagctgtgtcctcggtaataaaccttgcccggtgcaaggtaggcagtgaggaagtatttgtgataacagcaatgtaaagccatcaacacagtgcttggtacatgcagaacagccatcaacacaggcaaccatccctgtgaacagagggagtgcattatttatgatgggaaactagttttagttggaaaattatcaaattaccaggaacggaaagaacaaaacagttctcccaagtagctcttctggggccaagccccagcaccccacccatgcaggaccaggcccccaaaggccttggaaccaccttgttccagggtctcgctccactgtcctctcctccttcccaaagtcaggactcctttccttgggcttcagaattcctatcttctgctctagaaggcttggagcaagtgggggaaaggcaccactcaccaagtctgtcaggggatgacatggtatagagggagaggagctacataaaatacaagatgccagttaagtttgaatttcacataaacaatgaaataacattcctttctctgccatcgtggtgtgtgcttgactccacttctcgccatgtctttcccacaagacttttgggattaagcaattcctggccaagaaacaaaagcaaaatcgtccccagtggattcggatgaaaactgataataaaatcaggtacaactccaaaaggagacattgaagaagaaccgagctgggcctataaggaattgcacatgagagggcacacatatttatgctgtctgaaggtcacagtcatgttaccacatcaagctgaaaatgtcaccgctctctggagagttgtacatgttttattgagaatatattttttctctctgaatctgtgatgaatgcgttggttggctgggttcagtaataaatatgtgagacctttcacttaaaaaaaaaaagaactatttttttttttttgagaagggatcgccctgtgttgcccagcctggagtacagtggctattcacaggcacaatcctagcgcacagcagccttcaactcctggagcctctaaatccatcctcctgcctcagcctccctagtagctgggactacgggtgagtaccactgtgcaaggctacaaaataactttttagtaaaagtatatcccaaactttatacgagacgtagttactctaaaaaaaaaaaaggatttgctgtttatctgaaattctaatttaactggttgtcctggattttctttgccaaattggtctgccctacggagtgcgagggctgggattttaacccaggcctgcctgctctgagctgacctttcctggcacctgcaaaattaggatgacacgttaggaacttcctggggttcttaagggaattagaagagggacctgagtgcaaagggctttggaggcattcaactgctatgaaacgttagtaaggacagggattgcgttcacctcaatcacagctgaacccattgccgagaactgttatcccacacagctggatcttcatcattatgtgttttaatgaaaaatcgctgatattgctgtccctaaatagccaacccccaaaataattaaatcacctcaagggactctaggtccaatatccgcagcacgccacacaaacatctctcagctcagccacgcagggccgatgcctgcgcgacccacactcagggaggcgcccgcctcagggcctcacaggtgggaccgcgcctgagagccctgcgcttgcgcactccacgccgtgctctacgcatacgcctgtccagccccgcctctgggtgtgtggcgtgggcacgccggccgctcagaaagcgcgggaaaggcacgcagccacgccccaagggcgcagcctaggacaggggcttctggagcttctggcagccgtctgccctcatggcctttgcacctatggggcccgaggcctcgttcttcgacgttttggaccgacacagggagtccctgctggctgccctgaggagaggtggcagggagcccccaactgggggaagccgcctggcctccaggtacaggagctggtgccgaggcgcgacgcagccactctgtagaaaagtcgggcgctcttcctggccccgggctgcctcctagtgttgaggctgaggaggcaccccttggcgggccagccaggaacccccaaaaagatccttcctgagtacccgtgacctgctttgaacccttattttgaactcaaaaaagaaagccaggtggcagccccccttctgtggcttctaggatgttccccttctagaacgttccagaggctccctgcagctgggttggaaggtttcctaagatccttataggttggggagtttggggtacagttagctttgtattttttaaacgttttttgggataaaatttttggttaaactttaagggttttttttggtttttattttttggtttttttttagaaagaaaatgagtgttgtatgtcttctctcagtaagcgaatggttttctcagaattaacaaggacatcaacacattttaagtggtttataataagacaacatgtttaattgttttgcaagtggagagaatgtacatattttaaatgatttatttaaaatcaattacaggaaccctccagctatccatgttagaattaaccacagaaaacatgactacgttattgaccattttcacttaaaaatactttattttgtttcctcgacttgctttcttggttgagcaaagtttttcagccttttatttttaagcccaaaccaaccaccaaaaaatctgaaaaacctacaaacaaaccaatttttacaaaagaatttattttgagggagaacttgggagagtgagggaaaaggagagtggcaagtcccttgttaatatcgcagatgtagacgaatctgattgtatcttaaagttggttacagtattatcctgcaacactttttttctccaaactaggaaaaatgagtatttgggtcagtttttacctcccaatattagaatagattaaatgttttaaaattcattttctgaaacacaagttttcagtaaaaattctgaagttcctgtggaaattaaaactctcaacattttgcccgttttctagagtgcatttgatttctcttcctagacaataagctcatggtgtttataacagaacaacattttttgcagctgatggcttgtgaaattaacagtcagctgacagaaaactgggcttagtcttcgcattttgctgtagagtggcgtaatagctgccaagtcaaccgtttgttgcagaactcacaatttattctttccagggtagtgattaaacgttttcctttttgtatcgctaaatttcaaaagagccgattttaaggcatgagatcaactagggtaatgtgcgaccacaaaaggtgtttcttttgaaatttttgcattgcatttttgggaaagaaattcaaagccaatattgtatcactttttaattaaaacatatatcagtagtatgtcaagtctagtttgtattcaagttcagctagattacagtaggttaatatgataaaattacagttgtaaatttagtcattaatgtaaaagggagaccttccattggtaattgcttgagaagtaaaattacaagcaaatgaaatttatttgtaaatacagttgttttaatgcagtagtaaaggtttaatgggagagataattattgacatggattacctagtctttttttttgtctttttttaaaaccccaccccaattacctagtcttaaaaaagaataaaataaaaagttactttagtattgatctgggaaaatcttacatattaaaaagtcaaaatttatgattaagatggaatcatgctctgtttattgtttcagttctgaggttcttgcatctatagaaaatattatccaagacataatcacaagcttggcaagaaatgaagcacctgcattcacgatagacaacagatcaagctgggaaaacataaagtgggcattttgcatttttattttttaaatgcaatatctatgtcattattaaaattatttgaattagagttctggtcatatttttttcattttattgcctttaccttgccaaaaaaaaggatttaggaagtttacgaaatacataccatacagagaggttatgtaaactagaagtaggtgtgaaagatgaggcaaaggaaaacaatgctagcaccaacagaatggagcaccagaagaggttagaattccaaatgcatgtgataaagtctcataattttgctaagaataggcaccatacttggagctaagctttctagcagtcagagggggagatgtcatgggtgcaattctcacatatgccacaaaagcaaaccacttgctcaggggaaatataaccaatcctgataccagaccaaaataaaagtatcctgaacatagagcacatttaaggctttctcctgacagatcttctgcccctgctaaatcatgtgtccaaaaagggtaaaatcagcaaacagctttatcagaattcttgaacctagttataccggttttttccagcctctcatattttttaagagatacagaaacaaaatgaaaggaattttgagtctccttcatcactgttgttttatgatctatataagtaatataagctgtatacttttcagtcatgttttgaaagatggattttatctagctttgaagcagcttacacctgacatatccacctggtgccttctgccacctttaggggaagcttggcagttcaacttaacctaataaaattgttattttatgtaatgtaattttgcaggtaaatcagaaatgaaacatttcaaagcttattaaattgagtaaaattattaaatgagtaggttattaaaatgagtaaagtactaattgtgaaatatttgaaaacattttacatacactaaaaatgtcttcccagtaaaaaagtatgcacacacacaaacacactcccacaccccctaatcaaaggtgttagctcatttatgttaaatggtttatcttagtgcctctgtatgtcacaaacctaatttcctagttatcacctggaatgatctatgctctcaaaccagttgatcctaaagcttcagtgcttaaattgagaagaaatgtgggttttaaatgatgtgcagaagaccataagtatatattgtttggtgtttagaagttgtctttttcacttttttcctttgctttaaacaaaatgacaggtttgaagattctgtgggtcttcagatggtatcccattgcaccaccagaaagatcaaaagtgattcaccaaaatcagctcaaaaattttgtaagttaattgttcttagcttttggtaataaaggataaataaattttgttatcttctcaattttatttgttgctagttaaataattttacctgtttttaatagatcactttcatacataaaataaatttctataatttttcattgtcaataactatggaagtaggttatcaacataaacatttttcaaggtatatggttcagtgcataattatcctctcagttttgctatccatagagcaattaattttaactgattctgcaggtaattgttctgtacttaaccctcccattttggaaagataattttttaaatgttaactaaaattaagttaaaatccttgatagcagtatcttttgaatcagtaagagaaatgatgagtaacttgtttgttgaattttattttccagctctaatccttaaaatattgtccatgatttataaattagtacagagcaacacttatgcaaccaaaaggtaaatatattgttctagtaaattactcttcaaaatgtaatgtgagaaatagttggattaacttttattatatgctttgaaaagttacataagactaaactatagctcataatttactttctttatatgttgtgttttcatccagttaaagctttcttcaattaacactgtaatacttgtcatattcaaaaagaatatagttaattaaaaatatgtattttaaattttcatagggacatatattacactgacagtcaactctttggtaaccagactgtcgtcgacaatattatcaatgacatttcttgcatgttaaaagtgtcaaggaggagtctacatatagtaagtagtacctaatacaaaacattttattttaaaacaaaatgtttgtataaaacataatttttttttttttttttgagacggagtcttgctctgtcgcctaggctggagtgcagtggcgcgatctcaactcactgcaagctctgcctcctgggttcatgccattctcctgcctcagcctcccgagtagctgggactacaggcgcctgccaccacgcccggctaattttttgtattgttagtagggactaggtttcactgtgttagccaggatggtctcgatctcctgacctcgtgatccacctgcctcggcctcccaaagttctaggattacaggcgtaagccaccgcgcccagacaaaacataattttaaaacataatatagtcttcttttgctattatttgatgcttgcatttttctcactataaatttaagtaatagattctcaatatattcctttgggtgaatggaccaaactgatgaattaccaaatatttttaattcctaaatcccttacatattttctctttcatctctgaaatttcaatccaagtgaaaatgccagtaattcagcagatgaacacaaggagtgacttaatagcataaaacatattcgtgaagcaggtttcaaatatgtctattattttttgcagttatctacatcaaaaggtttaattgctggcaacttaagatacatcgaggaagatggcaccaaagtgaattgtacctgtggtgcaacggtaagaagcatcattgaagttttcacagctttaactcttctagctccttcagttttgaagcataattttatttcttgctttattatgtaacctagagcttaagatttcaaaataaaactgaaagatggataggaatatgctttacagaactgtacattacatagtttcaaattatgctaattgtcaaatgtcagattgaaataaacatacaaatataactcttaaaaatgcactattattttcagataaagtgtggcttggtcattttagcatgttatttagtaatgttcataaaattttctggttctgaaagtaatatttttaatactaaactatttgctgggctttgatacaaagagagcccacagtactaaacttagtacccctgttgggagaattgctgtgagtcatgtgccggttttcttactgaggggtaaagctgttttctactattttttaacagaggaagaagtctctgatgactggtatggtcaaagaaaaataaaaacagagggctttgtgataaactaaaaatgtggttattttgctttttatgtaagataaaaactttttttttaaaaggctgttgctgtgccatcgaatattcaaggaattcggagtatcctttaagtgggaaaactatttaaacttttggaatgttcattcattcattaattcctttggtaagccaagccttcataatgtgtaaggaacaagttaggccctgtagcagtcaagatgaacacaccatggtcccttctttagtactcttttaggagctcaccatctagtggaagagacagatatctgaatatatgaatagatgtgtttatatgtttgaaggtacaaactaaaatgttgtatctatagctgcttttgaattatctatatggcaccttaatttagttggtgattaaattgaaatactcttgctttcaatttatcagccttaacttcacagatttagttacagatgcaaagtttgtattaattgtagaaaaagatgcaacatttcagcggctcctagatgacaacttttgcaacaaattgtctccttgcatcatgattacggtatattatctaactttactacaattccaagactaatgtatactgttatggtgattggtaagaggatttacaatattatctacacaatgtcctgttttcaatataatgcatcctttgggatcatagaacgggaatttccaatgtgtttatttaaacatcctcaaagctggctatcacctcaagttcttttttttttaatagagacagggtctcgctctgttgcccaggccgaagtaccatggcatgatcatagagcactgtaaccttgataagttcatgtttctaaaaccacactcaaaagctttcttccttgaaaagctgagtgttcctgccacttgtcctgtggctatcagtgcagacactgcaatgaggtccacacgtcagagtcagtttgacttactcctcacatcccatggtcaccaagtccttttgaattggccttgggaatctctttcatttcagccctttctccttaatccttcccctttcattcttacacaagacaaccacctggtagcctccagacaggcccctgacttcaattatctctcatccctgccacaccagacttgtcatttccctccttgccagttcaaaaacttttggttttgtctgatacttctactccaaatctggatgcctctgtggaactggtcagcccttctaagactccattccgcctcctctccagggcagcgctcctcactgcctccataaacatctctcgcaaatgcctctcaagaagaggctgggactcgagggccatattaggaagagccatttttcaccaggtcctttaaccctgtttgactcctctactgtgttcatgtgctattatttttcccaaagaacattatgaaaatacactaaatactcacgatgagctaggacccctgctaagcacttgacatagtaagagttcacatttactggtgtttatcacatgtcaacttgtataggctctcaatggccttaggaggtaggtactaacatcatcgtcactttaataatggggtactggaatgcaggaaggtattttaccacgtctctatggctattcaaaaccaggactggatttgaatagttgaaatccatgttgctataatgccatcacttggtgtgataggcatatttatgctgattttatagataaagccatggcctaaagagactaagaaacttgcccaacatcacaccactgatgatgggcagagagggaattcaaactcggagctgtgacccgaagcccattctgaatctctagggctactctgcgctcttcctctgctctctgtttcatttggttttctgcttttctctaacattgttgtaacactcttcaatttacttttctacataattattattttaatgacttcataatattatcccaccatttaagttttattaaaccctaaatttaagccaggtactcttctaagtgctttatgattattaaataatttaattcctataataatctcatatgttgttacagagcatcaaaccacagagtggttttgttactcattcaagttcatgctgctaagaagtagcagagctgagatgcgagctcaggctgcctagccccgcaactgctgcagatcaccgctgtactatgctgcctctccacatccctgttgttagatattttggctatttatattagtttgcgccattttaaataacacttcagtgagcatctttaaatatgtaggatgtttattatttctgtttttgctgaaatatttccttaggaccatttcctaggactggcataattcccagtccttcagtctgtttgtatataatgtacatttttttttcacagtcaacaccagtctttcagcacctgaaatccaaggtaggaagatgtaacccttttttttggtgctgtgactcagatatgaaccagggttgctgtggccacatgcagagtactaaccgttgtatgagcataacctataatttattattactattattattatgattttgaggtggagtttcactctttttgcccaggctggagtgcaatggcgtgatttcggctcattgcaacttctgcctcctaggttcaagtgattctcctgcctcagcctcccgagtacctgggattacaggcgtgtaccaccacacctggctaattttgtatttttagtagagacggggtttcaccacgttggccagactggtctcaaattcctgacctcaggtgatcgatccccctaccttggcctcccaacgtgctgggattacaggcgtgaaccactgcgtccagcctaacttttaaattattaataagagtataattgtaaccattttattctactgaagttaaaattcttaattttcatcttccttttagggaaagggagttcctgatctaaacacaagacttttagtcaagaaactgtgggatacatttcatgttcctgttttcactcttgtagatgctgatccacatggtaatttatcactggactatttacaacaatagtcataactaaatcatatttgttgttgtgttttcttcctctttttttttttttctttttgagattgagtcctgctctgtcacccaggagtgcaatggcgcgatcttggctcactgcaacctccacctcctgggttcaagtgattctcctgcctcagcctcctgagtagctggaactataggcacatgccaccatgcctggctaattttttatatttttagtagagacggggttttaccatgttggccaggctggtctcgaactcctgacctcaggtaatctgcccacctcggcatcccaaagtgctgggattacaggcaggaaccaccgtgcccagcctgtagttgtgttttctactctcgggacacttatgaaacattttaaaagaaaatgattacattaaaatttggtctataattatttgacacaatttatcgttactttgtcatattaaactgagaatgataaatttttcactggtgatgtccacaaaattaaaattatagatagataaaatttgagagtgcaaattaacctgtaatatgtaaggagactaattttatagttaactttcttttaacaggcatagaaataatgtgcatctataagtatggatctatggtaagtatagaaaagcagttttccttttttattatttagacattttatattcattgaggtgatttctgcatttattaatcacccccaagcaggctgagagtgcccaaagtgtacctgagggcctagtatcctattctaggagcaatctgtgtgtcggtggctgtgactccagctcccagtatgaccagtgcaaacacagatgacagagtgggattagctgtgggcaagcagcattattatcctgcactctcttggcatactgaaggaactgtggggctctggggtgacaacaacgctgtctgatcaccaaatatactcgaaatattatatagagccttgaattctgacttttctaatcccttttctcccaccataaggagaaatggaaacaataaatgtcaccaccagtgtctacaattaccatataccagtggtctcacagtgtggtcctaagccaggagcatcagcatcatctggaagattcttagaaatgcaaatctcagtccccatccagaactactgagccaaaatctctaggggtgggatcctccaagcattctgatgcatggtgaaatttatagcagatgaaaaggatggtggagcagggtgtaagatggggaatcatgaacaataagaaatgtaggtcagagggcttcatttatagtttgctttagaaaattaatacagaaacactatatagaagttgtggttgttgttttgttgctgttttgagacagggtctcactctgtcatccaggctggagtgcggtggtgcagtgacagctcactgcaaccttggacttttgagctcaagccatcctcccgccttggtctcccaaagtactgggattacaagcatgagccaccgcacttaacccagagaagttttaacaccttcactaaaagcccagcttagcatagcccctgatggttttcttacttctgtgggctctgggcatgtgaagccagctttagtacttgtccttcttaataagtgaaaaatttgactgaaaaacaagaatgctagttttctacaatttagcctcacctaatatacttttgttctttattttagtctatgtcttttgaagctcatcatctcacagttccagctattagatggcttggtcttctcccttctgatcttaaaaggttagatagtatagcagaactaggatatttaaaatgacagttcattatcatatgtaacaataagcctaaaaagtcactacaagggaaagctcttaatgttttttatttatattgtccacgatgacttatgattatgtaattatgaattaaattcattaatgtttctgtttcaactactaaaatatttaacacatgaatttggttaatgtgttacactttcagctagctaaaactttctgttttacttttatggttaagacattttatacactttttatacttaaaagtacaatacattgtaggccgggcacatggtggctgacgcctgtaatcccagcactttgggaggccaaggtgggcggatcacttgaggccaggagtttgagaccagccagggcaacgtgacaaaaccctgtctctactaaaaatgcaaacattagctgggtgtggtggtggtgtatgcctgtaatcccagctaccgggaaggctgaggcccaagaattgcttgaacctgggagacggcagttgcagtgagccacgatcgcaccactgcactccagcctgggtgacagagcttgactctgtctccaaaaaaaaaaaagtacaatatagtaaatccaattaaattgtaaccattgacaacatcatttgccatatgaatcaatttttgtcatagatttaaatttttaacttcaaaagaaaaatatcattttaagagtattaaaatttgggaacttcaagtttggcaagtttattatatatgttcattatagaaaaaaatattaagcaacaagttaaatatcacctacagatcagcagccttacctttgtagattttttttctgtgcatagccataactttttcacaaaactgagatcatactctgttattttataatctgctttttttaaaacacaacaaaataatgtgatcacttttccatgtcaataaagtacatttcttattttagcatcttttgttgctgagttttaactctagatgtgctagtgtttattcagccattccctcatagccatttaagtggtttccaaatctctattctgataggtcgtgctttgatgcagtctcttgtaactaaatctctatgcacatccttagttagtcccttaggctgaattcccagaagaactggtgggtcaaagaggatccccataatcagggtttgactgttgtctggatagattaagtttcttgctttctctgaagagtaagagtccacctgtccctcagcttatggcattaacattttttttcacctctgctaatgtgatattttaaaatgttttattgttgtaattggtcagtaagaatgaatttaaacatgtttattggatttctttaagtggtgagcaatccttgataacagttgcttgtttcctaaatatggaatgtgaacaggttttgggtgatcagccacttcctataaaatgagggtccaagaggaaacatttcattctttatttttgaatattcacactccactggattaacgtgttcaatttagtgtatgtgtgtcatggtcagaatcccttgggggtgatctgtttgtataaaaacaattttaacacaaattcaagacatatgatctgataattagtaaggtgaatagcttcaagaaactctagctgcatctcataaattctatcagtgcactaaaaagccactccaaatgaatatacgatcaaaggaaaaacactatggtagctacagaagccaggctgcaagggaaatcctccaggcctccctttcaatcaaattgtcacccctatccaagaactgcccctggcaaatggtcataattatggacacattgaaaaagactctcctgggaaatctaggatttgtgacttcaaaaggtagtccacaccataaatccaggacctctcatgttctatttttaaaacacataccatgataaagttatattccacgtttttcaaatttaaaactagataggtaagaatgtgtttgtgtgtgtgtaaagtgataaaagtgtgtgtgtgtgtgtgtaaaatgataaaagtgagacactaacttccatggcccagaatcttcaaatgaattatgaagaattaaatactcaatggaacctaaagtccctcagtgaatctcagccgttggccatgcatattggagctcactgccagaagagtgtgaagctctgagaggcttaatgtacattattaagctgccctggtatctgtatacctgatggtagtgctattggcatttgtttaataaccaatatcagtcttcctgtcatcctgtcatcatcccacgagtgtgacatgaaggaaaacaaaaactttagaatcttactgtggaaacacaaacttccactatgaacttgaaaacttgctggtctaagacatgacagatcccttcaatcctggatgtaagaggtagatctgtactaattttcttatttctgagtttcttgaagtagtaccataaatacaggcaaaatacaggacattcaagttacagaaacacttttttactgatttttttcacctacttttttccagattaaatgtacctaaagatagtttgattccactgacaaaaagggaccaaatgaaacttgacagtatcctgaggagaccttatgttacctgccaaccattttggagaaaagaagtatgtttccttttacaactcaagtgttgcatgtttaattgtcttttactttagtagtggctattcacatcgtattttgaaaatatccctcttgaaattttatatgacacgactaacataagtgttgtttggcagtaaatagttgttgaaattgagtcatatgaatgctaatagatgagatcagtgaatggagctggcctgtttgtatccttatcatggttatatacacattcttgatggctgtatcatagtttgtgggattaaaaaaaggaagaagaaatcataaagatttcagactatccctaattattgaagacagcatacagagtactctcactccagatatttttagctgtagcagctctggaatattctggctgacccttaagactattgtccctggttttggagaataaagcaattctagattactagtttgttgaattgacagaaatgcaactaagaactctggtatgagtacattttacttttattgacagatggaaataatggcagactctaaaatgaaggcagaaattcaagctttgactttcctatcatcagattatctttccagagtgtacttacctaacaaattaaaatttggaggatggatataaaaataaatcagaagaacttctgattgccagaggcttttcattagttttgttttgattggcaaatactattgtggaaagaacatatattatattcttaattctgtaaaagtgaaataaaataactttccgttaattatatatttttgtcaaaacaaatgctgtactccaattttctttgcaaggccttattcttgcctctatagagacagatttctgtcctatcttctaaagcaaattataaaagaatatgttattttgacctttaaattatttttgaaaaaataatattttatacatgtcatcaaagtctacaaaatatttaccttctacgatacaactaatgttaacgcataaagtatcttactggtaacaaaaatcataatgatctgaatttgagatgttgcaaatgaattgtggtgtccggtagtttcttcttacattttcctttgcctttatactttaggggtcttactccattaattcatttgttacattagtaaaattcagtatgaataaatatttggattgatgtagtcttcagtgttttgctttattttgtattgagcctattttttattgataatattatttatttgaaaagtttctcgaaggtcttgaatgcttctctagtctgtctatagaacaaaaaacttcttcagttttaagatctacagaagcctcagattttaataaggtacttctccaacagtaaatatgtgaccttttccctccataaacctatcttaattttgccagaggtcagttttatgattttattctgtactttcagtaaacctttaactgcactgaaagtttcttgtgcttgcaagcaagaataagaatttatagaagcacggtaatattaggttagctattttataaagagaaatggtaacaataataataatatataccatttctgagaacttacatgtgccaatcactgctgattcagtatctcatttaattcccccaaggaccttgtaattactgggtaactacaccatagttttcaggtgagaacactgaggatgctatttgtccaaagccacaataataccaggggacaataatactacctacctcaagaaaatgtgggtctcaatgcaaaatgtaaatgtgggatccctttttattaagaatttcaagatgatagcagcagagaattaaaccaagcacaggcccttcttagcctggggtcctgggtgactgcacgggtggtacacctgtgaggctgggcctgcccaagaggttgtatgtagtaaggattgaagaaggtaatataataataaaggaaaatacatacatagcacttactatgtgctaggtatttttgtaggtgctttgtaaacaataactcattgcatcttcacagaaaccttatgagctaggtacttttaaaaaatcacccccattttacaggtgagaaaacaaaggtacagaaaggttaaataattttcccaaggtcacataactaataagcagtggagctgggacttcaaaccagaaagtgtgggtaccatggcgctagtacaggtaaagtacttcacgtgtggtctgtgtcctcactgcatggaaaggtctgcaagtcttattgttggctagtgtcaaatcaagatcccccgataccatacctacaattaacaaatatgttatattccctggtcacataggaaccacacatttcattttgggaacattctggtatgctgttaattttacttactcgtgagactatcaaaaattctaaaaacatttttataaataagaaaaaatttcctctgaatttataccatacttactcctttaacatgtaacagtgtcacttaactttggtatgctttgtaaaggaagaaattactaacttaaaaatatgtttaacccacgacacatctggcttaggatatactatcaaaatgggaaggagtgacaaatctacgatagtcattcaaatttaaaaataaatttgaaaaagacagatacctccagtttggataattaagtcatctcaagtttattattgcaaatttacttaaaataattttcaattatttgggaaatgaaaatggaaagagagcaaaatacactatagtttgacgttactacctatctttattagatgaaaatgaaaaattaatgctagtagctatttgggaaccatctagaattctaattctaaagatttctttctaaaaaggattaccataatacttagcatttaaaatggtaactgataacaataatctcatctaccatcatctaactgtatctaatttggatatttccataattttaatcaagaaaacattagattggaatctttaaaattaaaatgtataaaaactaatacaacaaggctgggcacggtggctcacacctgtaatcccagagctttgggagactgaggaggaggattgcttgaacccaggagttcaagaccagcctgagcaaaataatgggactcccatctcaatttttaaaaattagttggttatggtggcacatgtccataggctcatctactagggaggttgaggtggaaggatcacttgaaaccaggagttcaatgctgcagtgagctatgattgcaccactgcactcaggcctgggtgacagagtgagaccttgtttcaaacaacaataacaacaaaaactagtacaacaaaaaggtgctcagagactcttagttttcccttaagggttcataattaccctaacaaactaaaagttgcttgtagtatcccccgttttctgagaaatttgattataataattggtgatactaagtgatttcagaagttatgagttcatagggaagaaaaaccatagtgcactttataaaaataaggaaaaccctccagggtttccatctatgacttccttactgagtgtctcagttgagctgctagtttgatgtagataatctgttcagtggtgctgaaaagaacatattctctaagctatatatacatgtacattaaaagattttcaatgaaatgtttttgtagtgaaatattgagaaacgtgcacttctgtttgctaaatgaacttctctgttcactgttacacagataggtatcccaaggaaacaatcctgtagaaacaagccaaggtcgccctctgctggcaaacgctcattattctctcaactccttccactattttgggtggaaatttctttgaaatgttttcaagtcattgtctaaaggaatggggtagagtcttgagtcacaacaaaagagtttggggaaaaccaagagggtttctatgtgatacactcaacaggaatccgctttgttaatcagctttggatgccccaattccctgtaaagctacacttaatgtgtgcttctttgcaacctagctattcacaaaactttaagccaacatattacatctcttttattaaaaattcaaaatgaaaagtaactcatgctaagaatataggcatgttcagtttctattcatctagcaattaatagaaactgtacttattcataaatattccctgtgtaaaaatggcagaaaagtttaccagtttgaatgacagtcactaccaaaatttaattatttttctattgtttaattatttttcacctatattgtatggctcaataatcatacaatcatacccagggataaaatcttactgatctcgcagagcacggtagctcacgcctgtaatcccagcactttgggaggccaaggtgggcggatcacaaggtcaggagttcaagaccagcctgaccaacatagtgaaaccccgtctctacgaaagatacaaaaattagccaggcatggtggtgtgcacccgtaatcccagttactggagaggctgaggcaggataatcgcttgagccctagaggcagaggttacaccgagccgaggtcgcgccactgcactcactccagcctgggcgacagggcgagagtccatctcaaaaaaaaataaaataaaataccgttctccctttttgtttctaggaggcaaaacataaatcagcataatctgccacctgtggaagtgtagagttaggttttggggcaggctgcttgcattccaattctacgtctactccttgcctctatggctgggacaagttacaacctgatctcagtttcatcaaccataaaatgggcataacaacaataataatgacttggtagggtcatggtgaggattaaatgagattatccatttaacaagagtcttggaatatcagctataatatttgggcgagcatactgctcctcagtggttccactgatggtatatgcaaaagcagtttgtcaactacataatcctaaacagcgggaagagtttatagagcatgctgaataaccaggattatagaggaatctgtatcataatagaggcttctggaagatacattgggcgttgaaacataaaatgcaacaagtattaataacgaacacatgtaagatactctgcttggtgctgcaaagcatatacatggaagtagatacaagttttaaatctaggaatctagacaagacaaatacactatttaatgaggcagaatatgcctcgaaaccctgagagagctttgggagggcttttgagagtttaaaggaaagatagtaagaggagttccattgaaaaaggataagaaaatgtagttgaagcacttctcagagatgagtccaaagctttgctggtaggagggtcaggcacaggacagacatcatggacctactctgtatcagttgtgtgagctctggtaagtcacattgagagatgacagcgtgctggcagtcctcacagccctcgctcgctctcggggcatcctctgcctgggctcccactttggcggcacttgaggagcccttcagcccaccgctgcactgtgggaccccgtttctgggctggccaaggccgaagcccgctccctcagcttgcagggaggggtggagggagaggcgcgagcgggaaccggggctgcgcgcggcgcttgcgggccagctggagttccgggtgggcgtgggcttggcgggccccgcactcggagcagccggccggccctgctggcccctggcaatgaggggcttggcacccgggccagcggctgcgaagggtgtactgggtcccccagcagtgccagcccaccagcgctgcgctctatttctcaccgggccttagctgccttcccgcagggcagggctcgggacctgcagcctgccatgcctgagcctcccaccccctccatgggctcctgtgctgcccgagcctccccgacgcgagtgccacccccgctccacggcgcccagtcccacggaccacccaagggctgaggagcgcgagcgcacggcctgggactggtgggcagctccacctgcagccccggtgcgggatccactgggtgaagccagctgggctcctgagtctggtggggaggtggagaacctttatgtctagctcagggattgtaaatacaccaatcgacactctgtatctagctactctgatgcggccttggagaatctttatgtctagctcagggattgtaaatacaccaatcagcactctgtatctagctcaaggtttgtaaacacaccaatcagcaccctgtgtctagctcagggtttgtaaatgcaccaatggacactctgtatctggctactctggtggggccttggagaacctttgtgtctagctgagggattgtaaaggcaccaatcagcgacctgtcaaaacagaccactgggctctaccaatcagcaggatgtgggtggggccagataagagaataaaagcaggctgccggagctagtagtggcaatctgctcggggcaccttccacggtgtgggaggtttgttctttcgctttttgggaccacgtcgtctttatgagctgtaacactcaccgcaaaggtctgcagctttactcctgaagccagcgagaccacgagcccgccgggaggaaggaacaactccagatgcgtcgccttaagagctgtaacactcactgcccgaaggtctgcagcttcgcttctgagccagcgaggccataaaccaccagaaggaagaaactccaaacacatcttaacatcagaaggaacagactccggatgcgctgcttttaagaactgtaacactcaccgcgaggctccgcagcttcattcttgaagtcagtgagaccaagaacccaccaattccggacacaacatcacctctgtcagcttcattttccatatctataaaatggagataatcacaatacctatcttttagggctggtctggaaactacaggagatggagcatctaaagcgcttagcatagggtgatgctcaaaagagctattattaccatcatcgtctagactagaggttctcagtcttggctgcatcttagaatcacctggggagcttttaaaaaatattaatttcctcttttctagcccaggcgtactaaatcagaatctctaagggtgcagtgtaaacatcacagtttttaaaaagctgcccaggattccaaatgatctacagccttggtacttaactctggttcacggcccagcaacctctgctgggaatttggtagaaatgtggatttttaggcccatcgtagacctactgaatctgcattttataaaaagataccccagatcctaaacctccttaagaaggtcaaggcacgcagaccacactgagtagtgaaggagagaatccagggtagctacataacctcacgaaatcccttccttgtgatctgtcttttccttcacttccttcttcagatgctcctaaaagtaggggttgggaggaaacaaccaactgaaatatttggagtgggcgtgtgtgagtaataagaatcccttaacatttctacagacagttctattagtaagagtagttcacgtatgatttcacttgaccctaattaggaacagccctggcatcattttccccaccatgcagcaggaaactgaggcccaaagagccccgaggtgggctcagggtaccccagtgggcaaacagggagaggccagggcgggaaacccgcggccgacctcgccttgttcggaggcagcgttagagcagcttctcggaggttggccttggacgtgaattggaagcaatcagaatcttttagatgtttatacatgataaatgcaataattaattcacaagagaaaacagctagctaccttgcactagccctagttgcggattgattgactgatttgagatggagtttcgctcttgttgtccagactggagtgcaatggcatggtctcggctcactgcaacctccacctcctgggttcaagcgattctcctgccttagcctcccaagcagctgggattacaggcacccgccaccatgcccggctaatttttgtatttttagtactgacggggggacgggggggcgggggggcggggggacggggggcggggggggcggggggggcggggggacgggggcggggggcgggggggggcggcgcgggggggcggggggggcggggggcggggcggttcacgatgttggccagacttgtcttgaactcctgaccccaggtgatcagcccgcctcggcctcccaaagtgctgggattacaggcgtgagccaccgcgcctggccagttgcggatttataaaagcagtcgcttagtaacttgcagcggctacatcaactttggaccaattcgcaaactgctggtgtaaagcgtttttgcgcatgtgctgtcgccttgcgggaaaaggagcctttttcttcgacgatttccgggcgacgcaggaagtggctccagggcgcacgcgcgttgtttccgcggtagtcagggcagtttctaccgcaggcttaaggaggcttcgggctcctgggatttctgtccgcgctcctggccctcgtccttcgcgccagagcaggttcgcaaactcctcagacccttctgctcccggccgccgctttccgccggggcgagacccccaggtaggccccgtgccgcgcgcgtcccgtcgttaaccgccgccatggctcccgcagaggccgagttgcctcccgggagcgcgcttctgcgggatgctggggcgcgagcgggactgttgactaagcttcgttactgggccctggaagcgaggtcagagctggaaatggccttaggggtcacctagggcctaatccatcgtttctcttgtgggggaactgagcctctgggaagggtcacattgcgttaatgcagtgtgtgtcgcctctgtccctcccccttacacgtctggcgtctcgtcagatacatgtcagctcctgggagaagctttccctggccgctttgcagaagggcgtccccttttagcctcttccacgtcaacctgctccatttctttcgtagcagttaccagtctctgaaactaagtctgtttctgtcttagcccgccaagtatttattgtatacgtatataggtgccaccgtacaggcagtacttctccaggcaagtagtattaaacaccagccgccctgggccaggcattgtactgtgggacccagtatgcattaagggaagaatccaggcaagtggctgccctcttggagccagcattctgggggggaagagattttgagtgtaaacaagaaattccaggggatgtgatggaagattagatatgttaaagttggcaaagaagcgtctgaggaggtgactttaaaaaagaatacgtgtgacagctttattgaagtataaaataacattaatttcaaccattgaaagtgtatattgtgagtttggaaattttatgcagttgcgtaaacatggcaagttcaaatttgggacattttcatcaccccaagaagttcggaggaggcaacttttgaactgggatatgaagattcaaacggaggtagctgtggggagggagaagcaaatcatcccaagctgaaggaacagcactaggtttgctccaaggcagggatgagcttgttgtgttcagcggagaaaggaagccagcagagctaggagggctggggtgcagcaaggcgggagagagcgggaagagattaggtgggtcccacagatgactgtgccttctgaactttggaagcttcccagtgctcagcataaggtgtggtccacactgactaacacgaacgattctcacctaccatgttctttttcctaagttcatccctaatggcagaaatgttctctcccaacttgaaggttgaggtagaggaatagagtgaaagtaatatttattaagaacctgtagtgctttaggcagtgtgtgtgtgtggcttcatttagttctcataactctgtgaagtagatattagtgtctctgttttacagatgagaaaatcaaggttaagtgacccgtccaaagccgtgtaaccagcacctggactgattgcagaagccttgtcatgcctttgttcgttcatacagccaactggtgtttcaagtacctctgcatttgagggcagaagtgtggccggcaaggaccacatcccctcacgttcactaaaatgtacatgtgcttgtagctgttgctctgaccttttgttctgcacttatttttcatgaagctgaggaaactcaaatgccttccccaaattccttgcagtttctccgttctgtgttgtcttgttagcaaggatgtcactcagccatttggctccctttggagaggtgactggtatggaggacttttcagcgtaacaggtagtaggattgaaatgtggtttcagtgtacgtaactcctcggggagttggaaggaaaaaagaagggaaaagtcgtttattgtacccactatgaactagatactgcattttctacataatctgatttgatccccagagcagccctggagaatgtgttaatgttctctatgtttgcagagcaggaaaatgaagactggtgagattagagtcccaactcctgagtggcaagaggccctgaccaaaccctggtgggcctgttagattatgatattcaagaaaaaacccagggtgggagaggttcttgctgggtaaatgtccaaaacacgatgcccgacctttttaaaacttttacgaagaaattgctgattcgcttcccggactggttgttctaggtagtttcatgcggatgctgacctaaactagaatgtagaaattagtaggaaagtgaatgcccactaggtggaaacctgaaagcacggggacctgcgatcttgtttactgttatattcctgctgcgcagctcagggtctctatgtaaaaaatgagtgaatttattttctagctggtgcctacaaaataatctgcaatgtatccatactggtttattaatggtaacaaatgaaccgtactaatatgagataataggggaaactagatatggagtgtatgggaattctatctttactatttctggaaacctaaaactactctaaaatagaaggtttatgttttgaaagcactctgctcattgcgctcttgtctgaaaagtgaagcctggcctcaagccactttgagtatttctcttctgccagttaattatcttaccattgcctctcagtgatattaagagaaaacccatccttaacatttttcattactttttaggttcaaaatgagcctgtttggaacaacctcaggttttggaaccagtgggaccagcatgtttggcagtgcaactacagacaatcacaatcccatgaaggtaccacgaaaagcttcctggggcttgtaggaagagtttgggcagagtttctcccatcaaggacagaacccgagatgacttgggagcctcctttaggctgaaagctttgaaactttgtctaactcatgtttctgaaacactggagcacagaaaatgtgtccccgtacttgtgtcctgttcttcctggcctgccaggtctccagaatcacccaaggtgcagattccggtgcagattcccagggcctggcccagccaggactgttgactcagaattcccatggttggagagaggggatggcaggtgaaaactgtgatctagcactgtggggccagagtgaactggtcatttagaaaacaagaccatgggcatttcattagcagctgctactgctagtcctggtggtgctggtactttctctagcttattttttactcctgtctttgatcaaagtaaggaaaggtctaattcagttagttcttgtacacaaggaaaggccaccgtgaggtaattagtgagaaagaaaacaatttggaatgaagttgtgagcgtgcatacattttaacattgacttttttcccgcaggatattgaagtaacatcatctcctgatgatagcattggttgtctgtcttttagcccaccaaccttgccggggaactttcttattgcaggatcatgggctaatgatgtaagtgctccttaaatacgtgttctagaaatcatctctctttgtatggccaaggttagctttagctccgttgtttcccaagtaaatgaatcagttggacttatttatggccttttttgagaaatcaatttagggggtgtgaacccttctgaatggcagacattattcttacacccgtttttgttaggaaagcacaatcatatgtgttgctcgaaattttctactttagttcagtctcttgaagtttattcccaaatcaaatatcatattcatccagagtgaacattatacccagtggcacacaccaacaaattccctttcttggcatcctgacagtgttcctcaggcatgtatgaaactttttcaacgttaaataatagcacagatttgcctagatacttactcatcatgtacaaaaagaaagacaaaaaaattacagtttactaaaagaaagaaaactctggtagaaaaataagcaaagggtgtaaagagggacttcacaaaagaaagaataaacctgaaccattcatccatgcttgtaatcagataaatgcaaatttaagacttttttttattaaattaacaaaattaaaagtttaaaagaataatagtgccagcaaggataagctgaaaccctgcatgtatggctggtaggtatgtaagttggcttttccacaggataattggcaatagttatcaaaaatccttcagcttataccctttatctcactgatacccttctgggacttgagtaggaaatctgataatgtacttcatctgcattatctaaattaacctttataacagccaaagcactgtgaacttgtgaaaattttgaaaattttaatatccagtagtaatggcaatgtatagtatgtttgtatgatggaataccattgtaagtttttggaaaagcttttgaactgtagcctacagcacaggggcagcaggggttaggagaacaggagggaggatggtagtcaaggttgagcaagcttgctttctacatgtaatttttagaaagatttcagattatttgctgcttaaaaaaaggatgtttcaagttgaacaggctagtgatgcaggtgaggaaagctgtagctgcaaaagtgaagacactgtataatctagtgtcttccagaaaatatgcgtacatggaaagaagactaagagcacacagaaccattagctgtggttgtctgtggtgtgattagggtgatttttatttttttgccatatttacaaaatctctaaaatgtattacttttttaacggaggggagattatataaagtattcagaaaagaggtaagtttctactttggtcttgattctctgaatggtaatgggtaagtgatattctactttaaaagacatatctcatagatgcattgagaaaattatctgcaattttatgtgtaagcaatagaatttgtttattttaatagcttaggcgaagaaaacagttgctttcatagatattttaattcctttgttcttgaagttagataattaggttgctatgagaagtctatgtatggttaaggtgtaccccattagtttttaggtgttaaatgcaagcaatacatcgtaattgctttgtttgcattgaatttttttgttactacaggttcgctgctgggaagttcaagacagtggacagaccattccaaaagcccagcagatgcacactgggcctgtgcttgatgtctgctggagtgacgtacgttcccttccatttctcgtgttccattttacttaaagtacagaatgatttagaatatttaataatccaaacacaaatagcatatatgtgttcatattgtaggaattctaagtttctgaacataaatatagtcatttattgatgttcttaatgttggctttagttagccactttctttgaaagcttttcttgtattaaattttgtgtgtgtgattgaggagagtttaatgattaagggataatttatgaagaagccagcagggaaggtgaaacaccggtgccaagctgcagtgggcgggcctcctggagcacagcatgagctgcagctgtagaggggcttccacctggcgcgggagagccaggggatgaacagctgtagacgggcctcggcctggcgaggggagccaggggttgaacaccccagcctctctcctcccttctcctgccattgctgctggtggctgaacccaacagtagtgagaatgttaaggggcctggtgacaggcagacacactgcagtgctgaagaagctaagccttgaggccccttccgaggccttgtacctgttcctttagtcaggtttattgagtctgatttgcctgctgtaaaactgaacctttttggtatacagctctgtgagtgttaagaaatgcatagagttgtgttctagatatagaacagatccatcggcctccaaattctcttccttccttttgtcgtcaaatccttcccagctcgcagcccctggaaactactcatctgttttttttgtccctatagttttgcttttacaagagtatcatctaaataaatcctatagggtgcaacctttgcgctcagcatgttgcattaacgtatggtgattgttttgtcagatatatttcctatgtttggggtgggatgctggaaattaggacaagcattgagatatagcatctgcaaaatgctaatgtaagtggtaggagttttctcataaaagatgtacgagttggtcttagcggtattggggttatgccattcgaatttgtaagaagagagtggtttagaagggtcttggtaattaaatttgtggtatagagttctggtaaatatacagtgtgtagtgctcctaggaaaatagtagtagttagggcatttattatgataatattcatgtattctgctataaagaagggggcaaatgagcctgcggcatattcgatgttgaagcctgagactaactctgactctccttttgttagatcaaaagaggctcagttagtttctgctagtgtggggataaatcatattatggctaggggccatgatgataggagcagtcagaggaattcttgtgatgagtatgtgtaagttaaatgagctgcttatcagtagaactgatagctggataatagctagggtgacttcatatgaaatcgtgtgggccacagctcatagtgcgctgattagtgcatattttgaattagatgctcatcctgatcatagaatagatagacggctaggcttgatgtggctagtttaaataggaggcctacattaaaattagaggatctggtatagggaggggggttcataagaggagagcgatagagagggctaggattggagcaataatataaagggtgatagtagatgttaagggccgcgagggttctttggtgaaaagttttattgcatcaaaaaatggttcaagcagtctgtaaggacctacaatgttgagtcctttgcatagttgtatatagcctaagatttttcattcgatgagtgtaaggaacgctatcgcgataagagtggggataatgagcaggaggaggttaattacaggcatgttgttaagaagaggagttgaacctctgattataaagtgttaagttttatgcaatcgctgggctctgccatcttaacaaaccctgttcttgggtaggatgtgtgatgatttaagagactgggatggcatcatctatggagtgagggcactttatgaagtgggccctatttctcttgtcctttcgtagtaggaggaatgttaagtaggtagaaaccgacctggattactctggtctgaactgagatcacataggactttaatcattgaacaaacaaactcttaatagcggctacaccattaggatgtcctgatccaacatcgaggtcgtaaactctattgtcgatatggactctagtataggattgcgctgttatccctagggtaacttactccgtttatcaaattattgggtcgatgtgtaataactcacttagacttgtgtggtcttaggttgttaggaggttgaattatgctccgaggtcaccccaaccaaaatttttaatgcagggataggaggctagggcctgtaggcttgttggagtttttatttgcattgatgaattaaagctccataaggttttctcgtcttatttgtttatatccgcctcttcacggatagatcaatttcactggttgaaagtaagagacagctgaaccttcgtgtggccattcattcaagtccctatttagagaacaagtgattatgctaccttcgcacggtcaggataccacagctgttgaatatatgtcactgggcagatagtgcctctaatactggtaatgctagaggtgatgtttttggtaaacaggcggggtaagatttgctgagttccttttatttttttgtaatgtttccttagagcatgcctgtgttgggttaacagtgcaaataatacggtgtttattatatcatttattaatattgggatgttaactgtcagtgggttactcccgtctgatgtaagcttatgcaatggagaatgtcttcatcttacttacattaacattactgcttctattaagtaatagattagtccaatgtgatgttaggagttcagtagactggttagaatttaagatagttagatattgagcttaaatgctttcttaattagtggctgcttttgggccaactgtggtggtaatgttttttactctctgtaggaagggtctaaagagctgtctgtctctctagactaacagttaaacttacagggagtttaagtaattctgtgggtaagttgaaagttgaactaagccagccagctatcaccaggctcggtaggcgtgtcaccgctactcatgaatcttcccactgttttgccacataggtgagtgtgctctttcagctattcttgggtagctcgtctggtttcgggggacttggccatagttctatgtaaagttatttctagttaatgcattatgcagaaggtataagggcttgtctttgctttttagtcctcaatacagttctttcatccttcccttacagtactgtgtctattgccagaaatatctaccagggtagaaatttctatcgcctatacttttgtttaaggtaaatggtttgattaagatagtttgataatatttttagcgaggtttggggctagagttgtctgagtggtcaggtcatgatgaaatcttctggatgtaagccggatgctttgggttaagctacactttggtttatccaagcgcactttccagtatgcttaccatgttacaatttatctcctctatacctgtgtagaaaattatcagtaatagtgatttctagagtagtattcgaggaaggtgatgggctgtgtgtgcgtgcttcatggccttattcaaccaagcactctgctcttggtttactgctaaatcctccttaagcccttagatttcataaggctgtcatgagattttctggacatagaaaatgttgcccatttcttgccacctcatgggctacaccttgacctaacgtttttatgtgtatacttgtgcttactctataacctttttagggtttgctgcagatgggcatataggccaggggcaagaggtggtgagacgtatcggggtttattgattatagaacaggctcctctagagggatataaagcaccaccaagtcctttgagttttaaattgttgcttgtagtactctggcgaatggttttgttaatgtaactgttagggtttagggctaagcatagaggggtatctaatcccagttcttgtcttagctactgtgtcttcagggtattaaagctactttcgtagtatgttttatttcaactggagttttttacaacttagatggagcttagcactctttacgccaagttctattagcttgggttaactgtatggccatggtggcgggcacgaaattaaccaaccctaaatattagtatagcttagttaaacttctgtttattactagatttaacactgctgtttcctgtgggggtgtggttgagcaaagtgttttgagctgcatttgtgcatgcttgatacctgctccttttgatccgggtgatctagaggacattttcactggggtaggggtgtttgcatgtgtaatcttacaaagaactaataaaaaggtcaggaccaaacctatctataaggttttgtggacccatctagacattttcagtgtcttgctttgagtggttaagctacattaactgtgtagaatacttaagtggaaaattaaagtatgagaaagaaagaaagaaagaaagaaagaaatagaaatagttgcttacagttctggaaattcagggtctttaaagttggattggcagaggtttggctgagagggttattcataattagagtatggttgatttagggttatggtgtactggggcagcactttcagagggttatgctcaaggtatcatatcagtattagggcagaagtttagttaatctattatacatagtggaggatttattgggtaggaggagccttaagattttttagaaaattacatcaatcgaggggtagctgttggggtgttcgtggttaaaatatgtctgggctctgactgggttgcattttagtttcttgtgtttggggtttggcaaaggtatgtttacctaggttgatggtaaagtcagattaggaggggggagtttgcggatttattcggaaatagttcttgaaattgagcatacgtgcatgcgtgagcatctattgattaattgttaagtccttcaaccatgaattaacaccttatggttgttatgtcagtccggaatattcagtataagttcagctacaatggatttggcaggagtcaggctgttgccatgctgagtcacagcatcccaaagttaaaaaataccaaatgcatgacagtgctcccgtgactggctaatagggtggtagtgattaatccatcaagatgtcttatttaaagggaacctatgggcaatcttaattttatggccatacgttaatgcaggggtccccaacccccaggctgtggaccagaacaggtccatggcctgttaggaactaagctgcacagcaggaggtgaatggtgggccagtgagccttactgcctgagctccgcctcctgtcagatcagcggcggcattagattgtcacaggagctcgaaccctgttgtgaagtgcacacgtgagggatctaggttgtgtcttccttatgagaatctaatgcctgatgatctgagatggaacagctttatcctgaaaccataccctcacttcaccccagtctggaaaaattgtcttccatgaaactggtccctggtgccacaaaggttggggaccgctgctttaatgtgatcttatttagcttatatataagaaataattctgtgtataaacattttgacatagtttaggggccacagttgctcccattttattcagtagcaaggatcagcttctctgaggcatttttatcacctgtaaaatgtcttcctgacatacctgattaagttattgtgacactacattaatagatatatgaaaagtttgaaaagtgaagcattcatttcatatgcaacttatttttagtttacacacagaaaagtagcagcatgagtagatttgaaacatttctaatgtattttgtctgtctttactgatcgggcaacgggtcagaattagaaagtttcttataaagtacggcaagaaatagaattaactaatgcaggaatccttttgctcaaatgttatctaatggctattggaatttataaaacggaatctaagtttcatagcatctagtgggaggatcagacacaggaatgagagttgtacgttctgacggggaggcaggatgaactggtgctgggtgggaaaaacaatacagaaagcagctgtaaagtttggaaaggcttctgtgaatgctttacagaagacaagaatagaggtaaatttttgtttgtttgtttgtttttgagtgttgctctgtagcccaggagtgcagtggtgcgatctcagctcactgcaacctccacctcctgggttctaagtgattctcctgcctcagcctcccaagtagctggggttacaggcgcccaccaccacacccagctaatttttgtatttttagtagagatggggtttcgccatgttgccgagactgatcacaaactgctgagctcaaagtgatccacccgccttggcctccccaagttctgggattataggcatgagccaccacgcctggccagcagagctgattcttgaaaagtaaaccatttgcctatagctttttaagcattgtctcatccaattgaggcctgggttcaaatttcagctctgtctcttccaggcttttgactttgccaagttgtttaatctttctaaatttgttttcttgtttagaaaatgaaggtaggctgggtgcagtggcactttgggaggcttgggatgaaggatagcttgaggtcaggagtttgagaccagcctgggcaacgtaaggagacccggtctctacaaaaaatagaaaaattagccgggtttggtggcgcacacctgtagtcccagctacttgggagactgaggcaggaggatcacttgatcccaggagactgaggctgcagtgatccatgatgacaccactgcattccagcctggcaacaaccctgtctcaaaaaataaaaaaaattatctgagtgtgatggcacatccctatagtcctagctactcaggagactgaggtgggaagaatccttgagtccaggaactggagagtacagtgagctatgattgcaccattgcactccaagctgagcaatagagcaagaccgtgtctctaaaaaaataataaataacaataataaagtaaataataaaatgaaggtaataacacataataacattattaattcagcaaataattgtcaggcacctattgtatgctaaatcctggagataaagtggaaatcaaagtaggcaaaacctacacttctgaaactcatgatctcttaggacaaacaagaagaacaaatacaacttctcgatagtggaaaattgtgatgactagattaaacctacacggaaggattagcacagtgctgtcacaaagtggttaaggagcttgcctgtgagaacaaaagtgactggctgagcctaggcccagaccttcctggtgatggagcccatgtgcttagcagcctccctcatggagctttacaggaagagtcggagctacccgggagagaaagacatgtaggtaaaggcacaggggcgctaaagacccaaagttaccttggaggcataaaagccaaacttggtaaagttgaatcttcagtactttaaggacatggttcaaactctgcagttgaagcaggtagacttagagcagctggtggagcattcacacatactctttctctccccagtgttttgctggattctcctttatgtctgcacgtgtccactgaggttggcatgctctgctccacaatgctgatgacgtggtggggctggcattatgagattgagaggccagtgttcacttggactcagggcagccctctccatacactcatacctttcctttgctgtgttttcaaggatttgtagaattacaacctcattaaaagcatgaggagcaagttttatctcttctttcaaatgaagtcacttcaatggaacaagtttttgctagaggagaatggtggtcaatttttgagctctggaaccaaaaatgaaatatagactaggccaaggttcagcaaactatggcccatgagtcaaacctgacccattgtctatttttgtaaataaagttttattgaaatgcagccacactcattgacataatatgtctgggtgctttcaagctgcagtgacagagaagacctactttgagttctctgtgtgaatattgtgaaaccatcacacagtgaccactaatttttaaatctatttgacaagttagataggaccaatgactgttgtaaattggcatagctttattgcatgtacttggaagtgttattagatagggaccgaataaaagtaattaagattatagttatgtgttttgtatatagagagaaagataaatgtgacagaatgtttacaattgatgaatctatgtgaagtgcttatgggtattttttgtatttttgcaacttttctgaaggcttaaattttatcaaaataagaaaaaaattttaaagtggtccatggttgctgctgagaggagacctgggatcagggacaagagaaagagtttgttttcactagtttgtgatttctgatttttaaaatcctgtttatatgttctcgcttagaaaagtaagtcaatcatgaaatagatgaaaatgaattttttgtatgatgctgtagtttgcagtacactggtccccaaacaattggaaaaataaagattgccaaagtttgcctcaatatgttcaacgtagtatctaaatatatatatagttaaagatttaatttttcttaaaatgcaaaattttctccattttattttaggatgggagcaaagtgtttacggcatcgtgtgataaaactgccaaaatgtgggacctcagcagtaaccaagcgatacagatcgcacaggtaacagaagcctctgcagaaaggctaggcacaactggtacccaggactgtgatggctctttaagtgaaataattattataattataataagaaaacgtgcagttagactctgtcaaatcaattagacaatataacagaaacctctttagcacaaaaataacaattttataaccattctcattcttaactagtgttcacagattgtcttgtcatggatcttcatatatgtatggatggagtcataaggagttagtgacattaaaatctatgaaagacaggtcataggtggtccttgccattcacaggttggacgttgtgacctcgtgcatggctggtcttctaccaactgcatttggtcacttactcattcagcaagtgttctgtctatgggccagtaatagagcagcgagtaagaggggcatttccccacacgtgtggaacttttaccgttactcagggaccactggcaggtactgtgtgaagaatgccaagggcagaagtaatgaagataagagaacttagaaccagagggtccagcctgctaagggggcttcaggaagagcacagtgctgaaacattttcaggaaggcactgcatactcaggtcacagtgctgtgtgctagaaacatctcattgatctcttaattcccatcacctcagtgagtaaaactgtggtggaatcccctgcttgttatttctgaatatctccctaaggaggagcttactttcactcgcacatatgtcttaattatgagtaaaaaaattaaagtttgctagaatggaaggtagatatatgtttttgtgttaaattgactgttttgattatgggtgtattagtcccttcctgcattgctataaagaaatacctgagactgggtaatttatagagaaaagaaatttagtttgctcatgttctgcaggttgtatgagtatggtgccggcatctgctcggcttctggggaatcccaagggagcaggagatggagcaggcacatcacatggcaaaagcaggaaagagagctatgggagagaggaggtgccatactttacaacagccagatctcagagaactcactattgtgaggactgtgctaacacaggagggatccgcccccatgacccagacatctcccaccaggccccaccttcaacactggggattacatctcaacatgggatttggtggggacatgcaaactctgtcagtgaggaaggattggtaaaatgctaagtatgttttggtttttgtttggtatggccccagtatttaaattagtttcttccctttgaattgccacaactaaagctgttcagcacattcttacatttaccttgatctgttttgtttttgtcttgttgaaagcatgatgctcctgttaaaaccatccattggatcaaagctccaaactacagctgtgtgatgactgggagctgggataagactttaaaggtataatgtgcagttgaggcattgtttggccccatcaggattgtcatttatttttgcaccatttcgacttctgctctgaatggtcacatactggcttctcttttttgcttttagttttgggatactcgatcgtcaaatcctatgatggttttgcaactccctgaaaggtgttactgtgctgacgtggtaagggatttcaacttaatatgtatttactttaaaaaaaaaacaaaataagtattctcaccttgtggcgtcctgcagttagtgagtggataatataaaaatcctgctagctttagtaatagatataaaggatcgagttgagattgcctcagtcgtctccaattgggagatttttgtgctgcgtttcttttagaagtactaaatgctggatgtcaagttttcctgccactcgtttgaacatatgcagctagctacatgccatctctagtgtgacatctatcatgtcctttccatggcagtaggaaaacttgcagtaagtttgtgaggtggtaccaggtctttggggactgtttctgagtgggatagaaattgaactttctcggccaggcatggtagctcacgcctataatcctagcactttgggaggcaaaggtgggtggattgcttgaggtcaggagttcgagaccaccctggccaacatggtgaaaccccatctctaaaaatacaaaaattagctgggcatggtggcgcacgtctgtaatcctagctattcgggaggctgacgcatgagaattgcttgaacccagcaagtagaggttgaagtgagctgagatcacgctgttgcacttcagccttggtgatagagtgagatactatctcaaaaaaaaaaaaaaaaaaggaaagaaaaagaaatggaactttctccatttgtttagtcacatcttaaagttttgtaccaacaatcccgtaattccacttttaggaatttatcacaagaaaataatcatagatacagatggtctttgttttttttgtttgtttggtttttgagatggagtcttgctctgtcgccaggctggagtgcagtggcatgatctcagctcactgcaacctctgccttccgggttcaagcgattctcctgcttcagcctcccgttaactgggactacaggtgtgtgccaccaggcccagctaatttttatacttttagtagagacggggtttcacatgtaggccaggatggtctcgatcttttgacctcatgatccacctgcctcggcctcccaaagtgctgggattacaggcgtgagccaccatgcccggctggtctttgttttatgtaatatagtgaaacattggaagtggcctaaggggccaccaagacacagataaataaaccctgtggtaggttcatttgaggggacgttagaagccactgctagtacttgaaaaagtgtgtgacgtggaccttatgaaacatgttttgagtaaaggatatgaactgtacagaaatatgctacataccaagtataacgctgagaacaaaggctggaatagtgacagcaactgaaggagtggtgtaggggatttttatttattcttagttcctgagtatattttctaaatatccacatattttatagttagttttaaaacacgagactttttaaaatatatgaatgttctactttcaaatactatttctctaggttttagtgaaatataatcccaggattattaaaatccagacttaatgttgtaaccaaaaattgatcaaatacattagtataaaaacagcacactccttcacctgaagcgcatctctgttttcttccattccctagatataccccatggctgtggtggcaactgcagagaggggcctgattgtctatcagctagagaatcaaccttctgaattcaggaggatagaatctccactgaaacatcaggtgcgtcattagtcaaatcaagaagtatgtatttagcacctgttgtatgcaagattgtgctcacatctggaatacagttgtactttgtaaaacctgtaagtatgttcaaagaggggtgaattgaaggatataaacacaaatacttagtgagtgaatattaagtaatactaaggtatccctggatgaactgaatttatgtcttctccaaacatgcccctggatggctgagtgctactgaattgtaggggccaagggaaaacttctcctttgccctctgaaggggttcactgaaaagtagctggtaaaagacagattaataggagaaatggcatacaaatgtattgatgtgcacagcgtcttacaacgatcttaaaggcaatatggttgatgctttcataccatcttgaggtcacagaaagaagggggctcagggcatggcccaaaacaggctttcatggtaaattgggttctcgtggcaagacaggttatgggaagaagagaagaagaggtctgtgtagcaaaggtggtcttgttaatgtggaggaaaccccacaggtagcaccctcggagagaactgagacctttaacggcatcagactgcagttaatcttccctaatcaggacaagggaagggccttggagaaagcctggctgcatcaatgccgattttctctgcagatgcagatctccccaccaaagatagcttttcagctattatttccagcccttctgtatagccatcttgaaatatgtcagagaagtctattttggggcaaaatattttggtttccttgagaataaaattacacatctggatgggttggttccattgtaaattcctagcttccaacttcaactctgtctgcatcatgcctagatgcttgctagctttttcaccttagctcaatcctccacttgccacagggctgctgggcctgcactcttgtcagcttctccttcctttagtctttgtctcagccaatcagatcagctcttgctcagagaaaaaagaagctaatgggaacttcctcctctttctcctgccagatctagaaatctgcccgtgcttgcctcctcccctgccttttcccccatgaggtggaagccgtcctgctaaggccagttttgtggtgggacccatgccctccagccttctcaggaaccgtatgcagagtatcacctctttcccatacacccgtctctcctgccgcgtagtacttctcccttagcactgacactagctcaagtctagttgatcctagaaaacacacctcccttgatccccacatcctcctccagtactgcccgcgtccctattccttccgcagtggggcatcttggatgaaatgtcctttattccctcacctcccactcatttctaactcagtgagacctttgccccccattgttccaccagaactgtttttggcgtgactaccagtggcatcctcattggtaattccaggggaccctggacacccatcctcttactggaacagagcttcattcactgttcttacaagaaacatttcccctggctgctgtcttgccagcctcttacccgctacctctgtggctcttctatccttgctggctcttggctgaatgtggaggttccacagacatctccctaagccgctgcctcctccacccaagcacaactgatctcccatccactgtcgctcagccacgccctgtggactggagactcgtacctcattcctgtgctcctgacatggacacccagtcggacagctccttggtgtgtctcccaggcgtctgaagctacggtatcccacaccaaacccaagactacattctgtagctctttattcacatgttacccttgcctcaggattctcccttgctactgccaccagtaccatctactttatacgtatgtatggatgtcatatacatactaaatatttcccttcttttgcctactagaatgtaaactccatgagagcagagatttttgtttgtatttgttgctgcctcccagcacttggaggagggccttaagtgtaaaaggtgctctgtgaatatttgcagagtgaacatttgatctgaacctgcccctctcggccaccaccagcctgttgctcctgatgtgcttcacagcccattcaatgggacctccatctcctttgttatagccagaaatcttgaggtcacccctgattggaactttccctctcctgtctcactaatcctcagtctcctcccctctaccctgaaattatttgggaatctgttcatttttctccctccctcctgccaccacatctaattcaaatcttggaaagcacttagatcagaactctatgacattggtcttggcagtaatttcttggatatgacaccaaaaagcacaggcaacaaaagcaaaaatggccaagtggaactgtgttaaactaacagctcttgcacagcagagggaaccatggaaaagagtgaaaaggcagcctgtggaatgggagaaaacatctggaggctatttctgacaagggattgatttccaaaatacgtaaggaacccctgcaactcaatagtgagaaaactggtgacgtgaaaaatggaccaaagacttgaatagacatgtctccaaagaagacatacaaatacccagcaggtgtatggaaatgtgcttaacatcctaactatcaaggaaaggcaaacaaaaaccacagtgagataccatctcctagctgatgggaccactgttaccagaaagcccaaagataacaagcgctggggagggtgtggggaacatggaacccttgtgcactgttggggggatgcaaaatgccacaaccgttacagaaaactggaggcctcaaaacatgaaaaacagaatcaccatacgatctagcagttccacttacaggtcttgattcaaaagaatcaaaatgggtattttgaagagagacctgtactgctagtgttccttgcagcactgttcacaatagccaagtgaacagataaagaaaatgaagtgtatacctgcagtaggatgctgtgcgtgcagcctgaaagaaggaaatcctgccattcgtgacaacgtgggtgaccatgaaggagattatgcaaaatgaaataagccagacacagaaagaaactgcatggttccacttaaatgtgatatccagcatagactcacagaagtaaagggtggaatggcggtcatcaggggattgggggagagggaaatggggagctacttaatcaatgggatgaaatttcattaaacaagatgagaatgttctagagatatgccgtactacatggtacctgtagtcaacaataatgtagacttagaaatgtgttaagcggtggctctcatgttcactcttcttaccacagtaaaatcagcacttagaccttggccctggttcaaggcgtcctccggagctgaggcaggggctcttgtaagcggcaccactggccttgccggaccccagcctaagcccttccctgcctccccatttccttttggttgaatccaaaaaaaacctggtcccatctggcttcacttcctgccacccggtgctagcgccctggcctctccgttgttgagaactgattgccatcggcctttgcacagggccagtgcatgtggctcttggtgcaagtgacacccctggcattgtgcagttcctggtgtgccgcacagtagaccctgtgctgatgaccagccatggccttttctgtcatctaagaacttacagatgtttgtcagtttgctttactttttttcttcgtactcacaaaagtaatggtctggcagtttttaaaaaggcaggggagcaaacagtacaggaatgaaagaggaggccgttttccttcgtacttaggaaacgtgcatcaccagcagctgtcacgatgccagaggctgcttctcccttcgtcttgcctggcccctgcctgggtcctgccaggcttcccctgaactcacacggaagctcagatgaccagcttaggcagggtggatggccctccaagctttggccaggttgccacgactggaaggaggaagtggtaactccaaagttggcttctcctcggggtggtcggcttttctgcccaggaggctgggtagtggaatttctgggttcttctgtagaatagagacctgcccttgggccctcacactcaacactgggcgaagtgcagcgtgttgcttgtctgtagcatggccactgcacccaccgtccccttcaccctgttaccctgtgagacgggtgcggcagagcctgcatccctcctccagctggggaggcagaagcgcagaagcttcgggtgacctcctgaggggtgtctgcctagccagggacgtctccattccccacaggcagggccgctgtctgcctcgcagcccatggggctctgctggcgtgaacgcggccttgcagggtggcagagggagagcgagcagcgggggcgggggaggagcacagggtgtgcagttgggtcataaactcactgcttagatggagttactaaggagttagaaagcaatgcttactgctgtatcatatttgagtgattttttctggttcttctaaaacctaaacatggggtaaaaatgacttaccttcacgttagtcatgaaatcttatattatgctgtgattatgtctcttttttattttaactgtagcatcggtgtgtggctatttttaaagacaaacagaacaagcctactggttttgccctgggaagtatcgaggggagagttgctattcactatatcaaccccccgaacccgtaagtgtgactctgtcagcttgcagatttcactggactttttttaacaaaggaagacttacatgaacctttgtctttcagcgccaaagataacttcacctttaaatgtcatcgatctaatggaaccaacacttcagctcctcaggacatttatgcggtacgtttttagacactttaaccgtggtaatacatctggaaaccagacttggaggtggctgaggaattgtgggatcagaaaagactcatcactgaagagcttgtgtgttcatgtccggagataagtggcttatgctgtaggcttcaggtttctgtggatttttgttgttgtttttgagacggagtcgctctgtcgcccaggctggagtgcagtggcgtgatatcacctcactgcaacctccgcctcctgggttcaagcgattctcctgcctcagcctcccaagtagttgggactacaggcgcccagctaatttttgtatttttagtagagacggcgtttcaccatattggccaggctggtctcgaactcctgaccttgtgatttgcccgcctcggcctcccaaagtgctgggattacaggcgtgagccaccgcacttggccttgttttctgtgttaacgtgccgcctaactagcagtgttgtgtatttgtttctgaacataagcttaggatgttttgccgagagtcttctccctccctcaggagcgctggtagacagttcacacccacagctcagactgagaaatctgtttgctcaaaagaaacattttcctgaggtctgctccttgtttcttgctgtccacatgctcactttctctggtgtgcagccctcacaggaggcaagattgggttctgggctggcatttgatggaggaagcctggatagtttctcttgctatcagcgggcagcagctggaaggaaatgtacctgtgcgctttgtttcctaactcaagcaggaagtgtgcgtgggtggaaccttctctgcgcccctctgcctggcttctcattgtgcatgtcaatccttgcaggtaaatggaatcgcgttccatcctgttcatggcacccttgcaactgtgggatctgatggtagattcagcttctgggacaaagatgccagaacaaaactaaaaacttcggaacagttagatcagcccatctcagcttgctgtttcaatcacaatggaaacatatttgcatacgcttccagctacgactggtcaaaggtgagaactcccgggcctgctctgggtgctccaaggcagcagagccaggctctgggttcagaaggcctaggcctgagttgtgactcttctcaggactcacgtgtgtccttgggcaggtcaccgtcccctccctgtaaggggaaattgcaggacttcctcaaatggttgtggggattcagtacagcctttggccagaacccagcacacaggaagtgctcggccagtgtgagccattacgggctgctctgttcctgggcacagaagcacaggcaagccgggggctgcactttatgaagggggtggcagggcgggtcatggagctttcgcctgggtgctgttggttgcttggttggctggtggtttgggcagggggagttaggagctggcaggagtggggctgcatttttgaggcctttgggcatgatggtgaaatgtgtagactcgggtactctgcccaaccccatgggaagtgtgttggctttcaaccagcctgcgtgtttctccactgctcagctcttctggagaggttgtcatcattgtatttgtggttttcatcattctcctcccaccccactctgccctttgcccacaacagccttctagacttttccctaccctgccctggcttccgatggggaggtcacctgcttcacataggaggggcttccagtggcctgcagtgtctttcccgctcacctcatgtctgcctgcgctgaccccgtctccttccaccctcatggctcttttctgggccttctcccactgtcttctgtccccgtccaccagctcctcccctctgtctaagcatggaaggctcgaggaaccatttccatgtatattaaggctatcgagagagtggtgtcagcacctaccctcttggttccctgtgctctggcccctcctcagtccactgccaggtactttctggcctcttgcagctgtactcagagtccctgtggccacgtcctcctcatccagtccagaagcttcctttctgtctgtgccggtcactcacccgtcccttcctgttccatacagctctcctccctgcttcttggccatgtcctggtttattctgctttgggctgtggttcctgtcctcctgccagctcctgtctcctgcccctcttgccttgctggccccccgctatctcagcctggggggccaccacagggctctaaacagcgctttgcattcccaagacacctgctgccacacaagccagtgactggagacgtcccttggttcgggccctgcccgctccacctttagtatttcccagtctcaggagcgtggctgcacctgagtctccctgaggccccgaacttagacacagaagtccagctgattgccttccatccctctgacccctccaggcctgctgctgcttctgtgtttccctgtttgagggtttgctgtgtgagccatgaagctgtgttctttttttaaagcaactttattgaggtacaattgaaatacagtcattgtttaaagtgtacaatttgatcagtttcaacatctgtaaatacccatgaaactatcaccatagtcatctccccgaaaggtttttgtgtatattactgtaatcttcccttacgcacacacaaaaccatggatctgttttctggcattatggactagtctgaattttctagaattttatataagtggagccctacgctacattttcccctcgccccagcttctttccctcagcataaggattttgaaattcacccatgctgttgagtgaatcacttgtccgttacttttcagtgctgggtagtattcccgggtggggtgtgccatttgtttatccattcacctgtgtaagccatgcactcagttttgtgacaagagtgtacttttttggttctgcctggctgggggtggacaggctgtggcgtgcgtggagcccgaggcctcagctcccacatcgggctcttcattgaatctcctctttgcatactcatcccagcagctgcatcaaaattctgcattttaacttaaatgacgcgggactctatacgttatacgcgttaaaaaatgtagtaaattgaaagcagtgagaaaggtaattgctttgagtgctgtttaaaaattgaagtaaaatctcattcatttaagcagttaatgtcagcttattgtgggggttacataaattagcatctttttagtttaaaagagaaatttgcttcaggggtttttcattgttcttagttcaaggacagttatctccagtgcaaagtcatgatcacatatgattgatgttattagcttgctgcttgagttactgttcagaaaaactacactttgtatattatgagaattagtggtcactgttgagcaaaacttctagagctttcttggcatgcctgttgggaagagaataaaaatgtgtcatcagagtacaggtgacagagtgcacccagcgccatgccccacctccctcttccagtcctttggcccacctgcggctcctgcctgctgtctttcttccggatcatctgcctggcccaccccactcacctctcttcttaaaacttaaatgtgatcacatcactgacctgcctacagcctccttttccctggggaataacgttcaaaggcctccctctgccattcacagccctgtagtctggcctcatcctgatttcgggggtctttcgatgctgtatagccctgcatcccctccggtgtgggcccgggcagacgtgcacacctccgcacacgcctctggctcactcaccaccgttcatgcctctgctgtgctccgtgtctgttgctccttccatgtggggcggggtgtcctccttcatccccatgataccccgcaggtcagatgtcctcctttctgtgaagcattctcaggtcagaactaattctgaccaagggacccaaggcagttatcctggcgttaaagtcctggggtgttaaaagggggctcagtgttgaaaaggaactcacaggttcctactcacagactctctcagtaggacattgatgacacactggtaccaaccacatccttaggcctttctctgaggactgaagttctgcttcgcatttgactttatctttgttgttttatttctctgagagattatatgtttccagtattgtagcacaggacttcacctagaaaaagcacctacaaatgctaactttcttttgaataataagatcattggtgttttttgctctctttagggacatgaattttataatccccagaaaaaaaattacattttcctgcgtaatgcagccgaagagctaaagcccaggaataagaagtagtggctggagactctggctcagccagagttgtttctctccactctgcctcatctctgtacgaatttgggtcccagccttgttgggttgtcagccatggacatggatttcaacccctggagaaaacgatgtcattgttcagcagctgagagcccaggcgtccgcggcgacttgccgtctctccattccactgcctgttgcagagtttttctgtaactaagggggttgaggttattgtagacgttagattgcgggcaccgccagggattttgcagcgcttcagtgtacgtgttagagaatattggaaaagcgtctgtgagccccgtgctgtattttgtaataaagtcttttgcagattgcttcccgagcttcctttgtccttttctccccttgcccaccccgtaacctcaggaacatgcgtcctgcccagcatcagcgtggggttttgagttgagatttcagacaccctctgggaaatgcggcaaccttaggggaaagggagtccccagctgcgctcacttctgctgcgcggaacggcagcctctgtgagccctggtgggcagagtttgaatgtgtttttccttgcttccctcattcccatcttcaaaatccccagtgctttctggccttgctgctcagatttccgagtgactcaaatggggactgttacttgtgctgggtgacaggccatttgtgggtaacctcctaaggcccaagtgggtgacacttgcgtgactttcaagttagaacccaagccccctgcatgggaattgccctgaactcttacccaccccggtcccctgcatgggaattgccctgaaccctcagtagtggttgtttggctgttcttttgtattttgtgtaatttaaaattcctggttggtaagtattcaaaatgaaattcagctgggctgagaaaaagtgtgacttttgggtctgtcactgtatttctcacctgtgatctcaaatgcttcttaggcctttctgtttggactaatgtgtgaagtctgacttgctgagtgtaaaattctagtatcgatagtgttgtaagatgtgtttgcctactcataaaaaacaatgaaaataaaattttctactggaagagaccacctgcactcagtggtttaaattctttggtaggtcacaatgaattcagacccacccactctccagccctgtttttttagcccgaaaacttattttttagagataaaaaagcaggtgcactagaaaaatatctgaattttcaggttaacggtttccagctcattttcctcttcactttatgaatcaagcctgtggtcttatcaacgtggggaagatctagctagcataagactgctgtgaggggagattgaagcttgattatctcagcagccaactttcatattcagctttagcttagccagagtttcattgtttttaccacccctagtgacgggctagggtggaaaatgagtctaaattgcaggccttttagagtgcgctttcccaggatgggaccttgccacctccccaaggggatagtttttgtaattggcaaatttaaaacatttgcataaatccaagattggactgggctgtcagaacctgggagggagctctgctgccaccaggatgtgaaccctagatgaggcccaggctcatttctctgctgcccaggacctaaagcataaaagcacactacatgtttgctaatgaggatctaggaagtattcactgagatcgttaagcttcttcaaatatttatgttcatgtttcctaaaatgcatatgaagtcttagaggaactcttcatcttaaacttcagcatctttgcaggcacctgtaagttgcatgcagtaggtgctcattaagtattcataagtttgatggcatcttctacttcaaagagatactagtgtaatcttggctctttgtttcactaaatgtcaagccgtcctgccattaaatattgactgcacaccctgttaagagctgctttcgttgaaagtaaagtatataaacctcatggagaagacaaattgtgttctttcacttaattttttccaacatatgaaaattttaaaacatccacaaaagtggaaagggttttggcagtgaacatacacctgccatctgcctgccaccaggatgccaccatgaacactcacctttcccttgattttctgcttggttttgcctggctttcctcccagtctttgttgtaacatcgcttccttggttcctcactgtgggaacagggcctcatgggaagaactttgtgtaaagatgctgctgcaacaaggtggcagggatttagggtgggcacaggaaggtgcactcggttcctgtcatgtttggttggaagcaggatggagctgtggtgggtttgtgtgagacacctgtctgtgagcctgtgctcacgtgtgtgcacgtgtgcatgtgagcctgcctgtgaaaaccctctcagtcaaaggggccagctgaacccgcctgcctcaccccgttttcgggttagcttcacaccagagatcctctggcagaggaagaacaaaggatgcggcaagtgcctggcctgctggcagtgagcttgctgactttcaccagaaaatcaccaccaagagaaggtaaacagcaagggccaggcgtggtggctcacgcctggagtctcagcactttgggaggccaaggcgggaggatcacttgaggccaggagttccagaccagcctgggcaacaaagcaagaccctgtctcaaagaaattttattgagtcatgtaggaaatgtttgtttttctcattcaaccaaaattttcgtctcttttggaggagagactctaaaacatgaactaaacacatgttcttgaacactcgggagtgcctaagccagccttttccgaattcactcatgacccattcgtaggttgtgaaatgaacgtagttgttgcagtgagcgtttcttttagtggagccacacaaaatcacagaatctatgtatgtatgagatattttcatatcctggggtgggattcttctctgtgcctgtcactttttgtatggtttaggatgagttcttagcttcggtgacctcaagtactaagccataactgcacttgaggtctccccaaaatgggagggatgattatattaattatatttgaaataaccttataacattgcaattaagaacagggggctgggtgcggtggctcatgcctgtaatcccagcactttgggaggccgaggcaggcgggccacttgaggccgagagttccacaccagcctggccaacaaggcaaaacccgtctctactaaaaatacaaaaatttgctgggcacggtggcacctgcctgtaatcccggctactggggaggctgaggcgtgagaattgctcaagtgcttgagcccaggaggtggagattgcagtgagcctagatcacgacagagtgagaccccgtctcaaaaaacaaaaaaacatgtacttgaaattggactgcccaccttcaattccaactctgtcaccaactttgctaacatgtgatttaccctttgtttaagcctgtgatttaaccctctgagcctcagtgacctcatctgtaaaatgggagacattaaaagtagctatcataatggttgtgtgagtagtcaaagagttaaagcgtaaaagtgcccctgtggctggcccgtgatgtggagtttgaatgtagctgctactacgagtgccagtgaggatgacatccatgagaagtctcctgctcaatggggctgtgctgtcggtatacaggcgggacaaaaaggtccagagaccaagtgactggagatcttgcttgtctctaagattctttccccaggagccgggtgttgtgcttaggtctggccagcagatggcgcgaatggccccaatgccaacattggagcatgtgtttctgtgttcagtttcacagacttgagttcattaaaagaaatgaagtgttggccacccccttccattttttgttgtgttgctaagcttttaggatatttgggaagtagaatcaaaacattgcttatgctgtcagaagaatcgtcttaaaaataacacacttagattgaaggcctccttggaaaatgctaaaggagataatttgtcagaggtgggaccctgatttttctgtttcaaacttaatgtccgcgatggtttcctcgtggaacactgaagccttggcgcccgcggtgtgggggcctctgagcactcccgtgccccatagcatcatccctgccgtgatatgggaaacacaaatccctggtggtggcaaacaggtcactttaagactcgtgttagtaactttgaggctctgtggcccgttggaattgagatgtaaacctaaaacagcagatttcaaaggcttagcgccaaaaaaaatgaactaaacacatgctcttgaaattaatgtaaatgccattaattttcataccaattacacattcaaatgatactattttggataatttaactttcccctgcttatatttgttaaaatgtggctactggaaattgtagattccattcgtggctcatgttgtattcatctttctctgggacatcactgcactaggtcatctgacttttggaggtgtcacccaccactccacaccaaatattaaaatgcacccacatcctgctttaaatacacattgttttgaaggcaaattctttgaaaaactttcctattttacttctgaaatgatttggccgtaagcgtacactccatgttgatttcttaatcatgacctcgaataatagggaatttctcacaaagtgcagcgtttcctacaaagctacaaattgttttcaaattgattggatattagaacactaaatagtttgtgaggtctccagtattacatttgtaggcctttacttaaacggattaatttggggatttttcttgtttgtttttggtttttttggggggaggatagcatcttgctgtatctcccaggttggagtgcagtggtgcaatctcggctcactgcagcctctgcctttcgggctcaagtatcctcccacctcagcctcctgagtagctgagactacaagtgtgcaccaccacaccaggctctgttttttatttattttttatttttttgtatttttggtggatacagggttttaccgtgtgtgcccaggctgatctcaaactcctgcgctcaagcagtcctcccgccttggcctcccaaagtgctggtattacaggtgtaagccaccacacccaggctggggttgttgtttttaaatatcttcaagccagttctctttttctttctttctacctctctgcccttcaacatttttgtaggctcttaaaaagctgtataagccccagaccccagggcctggctatagtgtttaggaaaggcagtctcaacacaagcattgtatttccttgcaaggtactggcttgttaatcagagcctggcaatgtttcacagctctgcgaggtcttcctgctcactgcggttcccctatctcacggcctacatttatcccacggagatgggagaagccaggagaggttgtggctgcacctttgagggttttattatgacaggtgttaggtcactgtaaggcaaatatgggcagtgtaaacagtttcgtagccgactgtgtgagtttttacactttattgaagtgtgacatataaaaggctgtacatatttaacttatacaacttgatgagtttggagataaacatacacccatgaaaccatcaccacagtctaagagcctattgtgaattttgcatcaatctattgaaaaatattttttcaggtgagggctgtttcgaaagccaatgagaaacacctgttgcatacttgcttaaaatgtaaatcggctcccgaaaaagaactgacctgcattcttaatcttttattctttttccctcctgactgtggtgcagaggaggcagtatgggaggagacaaagctcaaagaaggcactgacaatccccagcatcctacgggcccgaatccacactgcggattccgtcagctcactggcggcagcactctctggtgtctttttttttttttttttttttgagactgagtctcgccctgtcgtccaggctgcactgcagtggcgtgatctcagctcagtgcgccctctgcctcccgggttcaggcgattctcctgtctcagcctcccaggtagctgggattacaggagtgaaccactgcacctggccttctcttgtgtcttttgtctttcatttctcttcttcactacccgtcagcatgataggtttcttcctcctcttatgaatcccagtgtcaagatacagcctgatcgccccttaatacggtgccgccattactccagacccctctgcaagcattggtcattcatcagctttcacgaggtgaactggggacgaggcaggggcttggaccggcttcctggccaggactcactgccttcctcagctgagaagactgcatttccaggttgaaccctgacccccactgactttgggcatctccatgtgtcctgtgtttgccagcctttccactcccttgtaaatctttctgcctccaggactggctgctaaaacaggtgcactggaggccgctccctgtgttacttgaagcatggcacttgccactgtcttcggtgagggggcgtttccctctggtgctggggagccagggcatccatttggggcttcatgtcatctcttgggacttcacgtacctcgaatccaacctgtgggccccttcggtggggctttgctgtgagagtaccttgactggtgtggaaggcccaagcatggttctgcttagcacctgacggttgcctacaaaaggaaaatcagtattaatatttgttatgggctgagctgtcgtcctccagattcatatgttgaagtcctcactcctagtacctcagattaggactgtattttggagacatggtctttaaacagtcaattcagataaaatgaggtcactaggctgggccctggtccaataggtctggtatcctagaccaggaaatctggacacagacaaggacagaggaagggccgcatgaagacacaggaagagggcgaggtccgcacaccacagagaaggccttgcaaggagccagccctgcagacatccagatctcagacttgtgccctcagaactctaagagaataaacttctgtcgctcggtctcccggcctgtggtagtttgtgacagcagctcaaggtgaccactacagtcttccgcagtggccacttgcatttgggctgcatgacctggtgtctgcaggatccacagcaccagccaccgcgcaccgggctcccagggcaggcagtgttgagcgtcttgtagcggcgctggtgggggcaggatctccggcctgtgccaccctcacagccactgcagaaacaaactcagccttccccagcgccacgtgcagctcacagctcggggattcgctgccccagcgccacgtgcagctcacagctcggggattcgctgcaggcttcccttcacctgctaacctgcaaggtgccagaaaaccagaagcagtagcgtccctgagagagttggggcgtttgtgccccacgtttcctgccagcagtggctgctttccttggcttgatcaaggcgctgcctgcagctgtccagcttcttacctgacgtctcggccgcccagctcagctcgcaagaattcttgttcttcgtggcacttccttttcctagagctttcatcaccaccattttgtttgtttgtttgtttttgagatggagtctccctctgtcacccaggctggagtgcggtggtgtgatctcgtgatctcagtggcgtgatctcagctcactgcaacctccacctcttgggttcaagtgatgcttctgcctcagcctcctgagtagctgggattacaggcaccacgcccaacaatttttgtagagatggaggccaggctggtcttgaactcctgacctcaagggatccacccgccttggcttcccaaagtgttgggattacccaccagcacccagcctctcatcaccatcttgaagccaaaggatgaggggacaccgagcccaggggcaagtgccatcatgcaggctggcgccagcacctgcctaggccccctatgcagcccctgccctcgcagacacacctgtccacactgtatagcaaggccacctccctcttcatgagaaagatcctggggcaacgaacaacttttggcacaggagaccaatcaggtcatttggttattgacagggagtagcaggctcttccccactttctcattcttctgcacccccagtttgccacttggactacactcctttccctaggggatgagggctcagctttcaatgtgagctgtgttgtttcccgaggttgcagtaacaaatggccacatgcttagtggctcagaaccacaaaagtgaatcctcttatagttctggaagcctgacatccaaaatgactattaggggactaaaatcaaggtggcagcaaggctggttccttctggaggcctgaagggaggatccatttcttgcttctcctggcctctggtggctgccagcaacccttggcttgtgaccgcatcactccagcctcctgttctgggctcacatctattcccgttccttagtcaaatctggagccgtcctcagatggagactcttgtgatttcaatgggtccctctggatgaccctcgatactctcctcacctccagatccttagtcacatctgcagagtccctgtcaccaagtagggtgccatgttacaggttccagggattaggatgcagaggccaggattcggccatgcacacaggccagtgtctttctgtctttgcagctgaaactgaggcatgtgcactctgctgctccaggagctgtccaccaatgctgctggggcggcctgtgacagcatcgactgagcctgtcattgccacctggagaggggctgaacctttcctctccccagtaccagtgcctgctggtgcattttggcctctgtgcccagtagtatggggaaactttttttttttttgagatggagtctcactctgtcacccaggctggagtgcagtggtgcaatctcggctcactgcaacaacctctgcctcccaggttcaagtgattctcctgcctcagcctcccgagtaactgggattacaggcacgcaccaccacacccagctaattttgtatttttagtggagacggggtttcaccatgtcggccaggctggtctcgaactcctgaccttaggtgatccacctgcttcggcctcccaaagtgctgggattcccaggctcactgctctgcacctggcagatgaaaatggcaacctggggctcccatggattcaaaggagctgggctgcaggctgggggtgtacaggccacctgcaccaagctcagcccaaagctgagtccccgaagagccttgatataaacaccaacacgacaaacaaaaagaggaggcccaagagcgcggggcctgaagactcaaaccagagccctgcctggatggggctgtgctgtttcagatcgcagtggccggcctcacctgctcctctctgcacatcctcatcagggtaaactcactctccctcctctgcagggcagctggagccacagctgggagcagagagcaggcctaggccaggcagttctgcatttgtgccctgcacacatcacacatttgcgagggaggcaggagaggacctctctgagcatcagtttcctcagctatataatgggcatcatcgtagtcatctcttcctagggcttttgtgagatgaactaagataacacacagaaagtgctgggctcatcctcacactgagcaggaattctgcgttccaagctcctgcaatttccattttctcacccagcacacacagttgccagtcctccctcccgctccccagtgaggcctgagggacccaagtcacctctgcccagcctggctcccagcctagtctcacaaaactgtgttccctttccaggggccctttgtgggccatggaacccttggcagtcagctgatacctaaggtaatagtattaaacacttaaaatgcttaccagccaggcacggtggctcacacttgtaatcccggtgctttgggaggcggaggtgggagggttgcttgaggctaggagtttgagaccagcctagacaataaagggagaccttgactctacaaaaaaaaatttaaaaaatcagctgggcgcatgcctgtggttccagctactcgggaggctgagactgcagggagctatgatcacaccactgcactccagcccggacaacacagcaagaccctgtctttataaaaaataataataacaaataaaatgcttagattagcaaaggaaaacaatcacattaaaatataggctgggtgtgttggcatgcacctgaagtcccagctactcaggaggctgaggcaagaggatcaactgagcccaggagttctgtatcagcctgggcgacatagagagaccccatctctaattaaaacaaataaaaacggctatgaaaatatttaaaaaacaaatatgtgatgtagcaatgtagacaagcaatgtcttcttcatcaatgcgttcaacaacaaggtcaagtagtggcgctgatgagactgtagtttttttttttttttgagacggagtcttgctctgtcgcccaggctggagtgcagtggtgcacataaatgtgtgtttgaggctgggtgcagtggctcagcctgtaatcccagcaatttgggaggccaagtcaggaagattgcctaatcccaagagttcgagaccagcctctacacaaaatataaaattatcccggcatcgtagtacgcaccggtaatcccagttacttgggaggctgaggtaggaggatggcttggagcccgagaggtcgaggctgcaatgagctatgatcgctacactccagcgacagggagagaccttgtctcaaaaaaaaaaaaaaaaaaagtgtgtgtttgggtgaatgactgattgtcaggcagaagctggtgacccgtggagacatggggccgccggagggggggagggattggtgatccagatacccaagggggcccgggggcggggggcgaaggagtgcgactggacccgcacctgggcaaccgcgtctccagcctccacggccctgtcccgcccccttccgggcaggcagaggccccggggctgccctgccgcctgggcccggcccccgcggcagcagccgagcggccgcacccctttgtggggctgtcgtgccgggaggggcgcgggcgaggcgggcccgggcggcgctgggacttgtaggccgggagcccgggcgcctccgggctgaagcccgtggccacgccaccgacgcggctccagcctgcccaggcaacgcgacggctggggacagccttggaaaaactgaaggggaaaccgaggcctggtgaagggatccagctggcgcaaaagcacgcggccgcgcagtggccgcctcccccggcctctagggggcaagtgaaggtcacacttaaatgaaagttttcaaagtcgcttcgaagggcctccggctgggccagagctttcccccaccccaccttgttccatcgtggatacactcaacaaacatatcccagagccctctccttgccaggccctccagcttgggcaaaacatcccaggtccctgttctcgcagcgcccaaatagcaggggaggggctccaggcaggcgaacacacagggccggggaggtgggaaactccgcgaaggaaggagaggaaaccacgcgggatgaagggcaacgggggccgcaagcgggggcaggagcgccaggaacgaggaacgaagggggaagggaggaaaggacgcccaggcttccggaagactcgggggtcccatccccactgtgcagagggctagagcgggagctgggggagggagaggtcagaggtcaaggctgccgcgtggagcgtgggccgtggagtgggggagggggcgggcagactcctccccgccggcagccagggcagagggctggaggaaacgcggagaactcctcggtgctggaggaaacgaggggaactcctcgccggccttgcggtcccccacagcccacggagtgccactcccagtccccacagaccccacctgcgtcgccctgtgctgagaggaggccgcagggctggggccgggagtgaccccaattagagctgctgtttcccagctgcataggtcccaaccgcgggggctggagatgaggcgggcttgaggcccctagtcccggcttcagaggtggagggtgtgacccgcaggtccgggatcccggggtctgtgcagtcacacggcccttcccttcgctcaggaaagcccggggctgagtttcatgctcaaccgctgccaacttgaaattcctagcttttgaataaggggccccgcgtttgcattttgcactgggccccgaaaattctgtggctggccctgcctggtgtgaagctcacagagccccactatgcgccgcctttctatggctgggggccggatgagggacccgggtctgctcttactcgccccaagggtccctgacaccagcccagaacggggtggagctggaaagagcccacacctgcttcctctgcccacctcatctcccgcggggcctctgagaccgcccgggacccgcttctatcgcggcaccgtggtgtagctccctccggggtcgtatgctgtatgtttactagccgaattctcagtcctggacgctccgtggggccagggaatatgatctgtgctccgctgcagcctcgcgcccagagtaaatatcggtcggatgaactaatcttacatataaaacagaaatcatttcccttttttaatatggcacgtggctcttccctaagtcgccctgggttaaataccgactcaattaacaagatgctaaaaaccgtttacgtttttttacgttttttacgtttaattcaccagacggtgcgctccacgagggaaggggcctggcctccctagttcagggttgtgcttagtgcctgcaaccggccgggcccgcgggggcagccaggagagaaaggcgcgcccagcgcccccaggcccggatccgccctcagcccgcgtgcgctcccctcccccctccccccaatcgccgcgcgcccgggtgcggctgggcggggttagaactacgcttcccggcggtccccgcgcgcccggggcggggcggggccggctgggggcggggctgagctggcgggggcggcaggctacaaagcccgggggcggtgccggggcgcagagtccccgcagcgccggtcgggagcgcagcgcggcgcacgtcggcgcgcacggcgggacgggcgccggagtggtcgggcctggcggctggacgggcgcccctcgctgccccgcgcgctccccgccgccccccatgagcgcagccccgcgcggcccgggtccgtaggcggcggggcgccccccatgctgctgcagcccgcgccgtgcgccccgagcgcgggcttcccgcggcccctggccgcccccggcgccatgcacggctcgcagaaggacaccacgttcaccaagatcttcgtgggcggcctgccgtaccacactaccgacgcctcgctcaggaagtacttcgagggcttcggcgacatcgaggaggccgtggtcatcaccgaccgccagacgggcaagtcccgcggctacggcttcgtaagtggcccccgcgcccgggcccgcaccccgccgcacaccttatcgcggcccgggcgccgagtccactccggggcacacgcccagacggcccgctgccgcccccgccccaggcgcctccagccggcgcccgcacctgccgcctctcccgggcgcgctcctgccggtcccgcccccaccaccccaggccccggcccccacccccacccccacccccacccccacccccggtttaaaaggaagagccgctgtgttcaattaggactcctaagttggtggggaggttttggagccagagggcactcgggatttcctggagcagcggggggtgaggagcaatggctccaccccggggtgttaggagctcttcggcctcccccatatttttaacagccctctcagccgccccaaataaacatcagcttaagtaaaaacgtcttgaagacactttcctgcttaccttccaagcatagcgtcgcaaactccttctcagaggaaagtctcggccctcactggtgggcaagtccaggcggccccccaagctcccttcggggttcatttttgccctatccccgcaggggattatttttgtccttgaaggccacatttcccaggccttgaactttgacgggaggagctggaatccaggaggcatctttgtgggagagccccaggtagggttcagaggagctttggctcaaggaccctgggtcacaggcaccctcagaggaagggaagagaggggtggcagcatccggtgccagggcggagccgtctgcccctttcgcccctggttccccccacggcagcccctgatgtgtctctgctccaccaggtgaccatggccgaccgggcggcagctgagagggcttgcaaagacccgaaccccatcatcgacggccgcaaggccaacgtgaacctggcatatctgggcgccaagccgcggagcctccagacgggtgagagcttgtgttttcctgcctggctcttctcggtttctatattgggtgtcggtatctgtcgggtggaaagaggccccccctcctcgccccagcagtggcagtcggctatcatgtgcctgcagagccggcacagggcagccatccccccctcgaggatctagaccccttctcacagcgtgtggcccaaagaagggggcggggggcagggagggtactgcaccccagttgccagctgtcctcgcaggagggaggaagtggccatggggcctggaggttgggagtgccgacaccagtggctgctgacacctgcgtcactcactgccacacttcagcggtgtgccttggggttcacaagggggaggcctgggaggggagaggaagcggatgatcccttttgactagaggtgtgtggcttgtgggattctgccaccctgtgtgcagcccttgagacgtggctcgtgcagcaaggccaagtccctgattgttctctcgttttaggctttgccattggggtgcagcagctgcaccccaccttgatccagcggacttacgggtgagtggacatggctggcttggggtgggtagtccgtggagatgaagtggagagggccttgggcttcctgggtctggaaggctggggaaatgacagttttcagacatttgattgcgtttaagccaagggagtgaagagaaggcagattgcacttctccatccctggcagaggccataccacctaggggatggtgagccttggagcctgcctgccttggtacacaccccagctcccttcgctaggtgtgtggcctcagtttcctcacccgtaaaatgggagtggtcacagcacatctgagttctctgaatggagggcctagggtgggcctggtgcaggtaacgccctcttgaagtgtttgctgatgactcttagggactggcaggctgagttcttccccaggcactcctctcacctgttctagtgctggggcaggtggtggcagtaggtcattgctaccaaggtctgatgtttgtgaacgttgctgtagatacgatgtgtttggggtggaggccacctgcctgagtggcctggcctatgggcttctagtctgactcatttacaagcagcgcagcccactcttctccatcctaaaacgcctcccacctccctgcccttttttaaaacatctagtaagtcctggcagctgcttggggagggacacacacacttaagggatacaaagagtcctgccttgcggcctgcctccccacccccatgatggatggaagctgtctgccctagcgccgtggcatattgatggggttggagttggaggggaaggcagctcagagaccaccacccctttcagggcattggcacttcatgaactttctgaatccaaatccctaatgccagttgatcacgtgtgtgtgctcacgcatgtgcgcaccacgtagattccattgagagagacacagcttgaggagtaacctgcctgactggggcagtgtggacaaggatcctgtggaacccggctgagcctggctcccaggtgaatgggtcccctggggcctggctcccaggtgaatgggtcagaggccccagcagaagttgctgtgcccactttttgggaacgcttggggtgactcgggggctccctgccggcttccgtgtgtattggtggatgtgtgcaagtgtagcagtgggaggagccgctggctgaggggtgctggagggtggccggggcccttctagcctgtgcgagtggccgggcagctcaggttcctgccggggtgcctctgtcctcctgggaagggagcgtgtagggtggtgggagcaggcggccctgtccgtctcgtcctggaatctgttttgtagatgtctagagtcgtcttagagggtgtttggggacactgtagccttcatgccttcaccgagattcttcctatggggttcaggccacatgaagagggtgttccttgttttccagaaccttggctccattccccaggcccacagcaggcgcctgggggcatggactgggcgggagcagctgcccagaggtgagggtgtgtgcctccagtgcctgcagctcttttctgcttacagtgggataaggccttcccacgtgcgtctgggctcgctctgatccacacagctacctctgggactccatacccatcagtgcttggcctctggggcctgcagaggtgggttcgaatcctgactttgccccttaccagctgggtctgtcttggcagtggcatcctcatccggaaaacaggaacattaactgcttaaaacagtgcacaggcatgtgggctgggtgctctggcctcctcagaagtcctctcctgtcctcatagcaggcctctgaggatgggactgaaaccattcttactttatagatggggaaactgaggcagagaaaggctaaccacctgtctgggcctgggggcgggtggcagggccagggtggggaggcgtgaggtaatagacgtccgggaggagattggaacacaggtggtgggtgcctgaacgcatgctttcttggtgggggacggtgggaagggccctggcccgacctttcccttgctgtcctggagtcctgtgaacaccacccatccagaagcagttgggatcggtcacagagtttgccactgtgtgcccccgacttcaggcgacggtgttttgtaactaaatctgctggctggccatttaatacttgtgacgatgaagaggccgcagactctatttgttggttgccaaagggtggagacccaaacagggacggtgtcagaggggccatccgctcttggcttcctgggagatctgaactcaagcctctgagaatcgcgccgcctcctgcccctgcctgggccttactgaggtgggtagggggaggctcccgggtgcagctccagggaggcagcggggcaggctgcctgggtcagctgtctgcccccagcccccgcccgctgacggagctggagagctgggccggagctggagagctgggccgtcagcgtcccttttgtctttgtgaacaatcaggccccgggagcacagccgggcctgactcagcggccagttttgtcggccttgggctggcagcgacttgctgttggctgagggcatggagggaggtgggagccaggagcccaggcagctgagggttgtccaccagttaaccccttccgtgcctggctgaactcttccttgactttctgaccccgaccttttataccttgccctggacaactctgaagatcccacagctctgcttttaggcaagaccctgtggaatcttcttcgcctggctgggtcttaaatgttagtttagaatgatttaccaaagaactttacactttatgctatttgccggagtttccttgcctcttttcctttttttaagttgaacaagctctgtgagacctaactcacctgtgcatttctgacctaactgtatgtggccactgtccgcggtttggaggagccttcctcggcagtggcaagcacgtggtagtcacagcaggagccggtggccgtggcccaccaagggtgtctgccagctgagtgtgtctgtcacctgccggtgggaggggaggtgcagcagtctggagagggtctgtgtccaggcagagcttagtctggcctggaacggtgccctgtgtcaaggggtgtctgtccattcttgggctgagggcaccgggagcagaggtttgtcctgggactagctgcacccagagcctctccttgggttatttttgaagggccagctgcttccctgggtgcgggtctccctgcctgttaagggggcctggctgtggccttgactcccgttcacagagtgcctcatatgtacattatagaacgtttgaagggggtggaatatccctggcctccacccctagaagccagtagcattgcctcgcccaagtcatgactaccaaaaatgtctccagacattgccaaatgtcccctggatttagtggcatgaggaccagtatctgtgagtctcttggaccttgcctcatggtcacaagatgactgccacggctccagacatcccacccacgttcagggcagaaaggacaataagggccagtacgaactgcctctgtcttttttagcagaaaaatggaagttttcacagaggccacaacaggcttccacttaagtctcactggccacaactgggtgacaggacacggccaccacaggggctctgagatgagaagacaggctcctcggactccggagtgtcaggtacaggctgtatccaggagcaagagccctgggggtctgcctgggcttaaggccaggcccagcctgtctctgcaggctcctccccatctgtgagtgagaacggtcacactgccttccctacagggccaacttgactgtgtgtggagggcctggccctgggaagtcacggtttgtcagtgacgcatctcttgccggccctgcttcagggtctgttgattgattacctgtgcaaaaccgaggcttagagcaactgagagacttgctgagttcacacatcccaggatggtggggcctgagctgtgggctgcgagactcttgtccctcccacaaggactcaacgcctccctctggctagatggcagctcttggatgattcagagcacaaggcctcgagactgatgatgaccgtgagaccctctcccaggcatgtgcctgccccactgcatgtatagtttcagggacccctacgtcctttgtgtgaaggtctctggtgcccactgggtagtagatggctgcccttaccatcacggggccttggtgtgtgcacaccacggggcctggacagagcacctgggtccccagagcaagaggacgtactggggaggcagtgatgggaagatgtctgtctccttgagagcatgggatgcacaagctggggagaatgtcgacagctactcccagcatcattcattcatcaggtgtttattgagtgcttgctgtatgccagacctggtgccagggatcctttgaataagaaagacacggtccccgatctcgtgctcacattctgtttgtgcactcgtgggcccacatggtgatgcgtgcagttaaacaggaagctggcggaatgagtgcctgcgtggggacggaacagttccgcgtctcgagtacagtggtggggagatgtgtctgtgtgtgtgataaagcttcacagtttgtgtgtaactacacatgacatgtaagaatgttggtgtgtgtagaagatgatgcagcgtgctgaaggcctgcagtccaggtcatagcagtgtgcctgggttagtgtcctggttttgctcatgtccttagttactctgatgtgcccttgggggatggaggaggtagggtacacaggatctctctgtactgtttttgcaacttcttgggagtcttttattattttataatacaaagtgaaacaaagccagaggagctgtttgcaggtgatggcgtgtgtgtgtgtgtgtgtgtgtgtgtacgcacgcacacgtgtgcgggcgtgctggggaaggctccactgaggatggcggaaatgggccctgttggcttctggggaagagcgagcagcccaggcccagggtgacaggccagctgcaggtcgccgtggcgggcacagggtgagcaccgcagggcaggggcagaagctgaggtcagagccaggcggcatgggggctgggaggaagtgactccccccaacactgtggcgtcacgttttcaccctcagggtgtctcgtggtggccccgccgcccccctgcccccccacaaggcttcctgtttggcagctcatctggagccaggcgtgggctgcaccgtggccctcctgggcgggcgcccgtgccgcacctgttgtttgtcctgtctgctgaaacagaaagcagcctttgggtggcgggggctcttctccgagcatgagttctcaccctggctcgctgctgggcttggggagcctcttctggaagccttgggccaaggggcacagctttgtctcagggtagaagcctgatcacagactgagtggaggcccaagctcgagctttcctcgtttagcctcagtttcaccttgtgtccagggtggacaggctgataactctgcagtgtgcttgcgggcatcaggaccttcctgctgatctcatttggatagagtagggagctggacactgggtcagcttgtctgacagatctttgcttgctttgtgccaggctggggatgcctgccatgggggtgaggggagacccggtcccagctcctaatcacagtgctttctgcagcgaggtgctgagaggaggacagagacaaaggaggtcagcatgcctcagaaggcgacaggagctggggaggggaagggagcagccggggaggctcagggcccgacagggtagcctcagctcctagaggactttgatgacccagggaggcactgctacattcctccaagtgacaccggaccacgcaggctccgagcggaggagggatgggtcagtctgcatttttgttttcagagtgtttttgcttctggctgctgggttgagcctggactgccgagggtattgtggtggttggaggcccttagaggatgcccagtaatccaggcatgagacgagggtgctgcctgcaccagcggccctggtgagatacagtgagattctgggtgtctattttaaagaacctgggaaagaaagaggagtccaagaagattctggagctttgggcctttgaaatgggagatgggcttggccctgactggggtggaggcagctgtgcagtacagttttggggagaaggtcaggagttggagtttgggccggttcaggtggagatgctgttccgggcctggcattgccccacagagagggcgttcgacctgtgtcctgtggctggctgccccacagaacttgaatgtccctagacctcccggccctccccctcacaagtcactggggattcccgggaggcagggccatggcctggcttcctgcctgccaggcgcctcggggaccttcccacacccagccaggcgggagtcagaaccctaagagctgcggtccgtctctgccgaggtggggcaaggcccctggagagcagggaaagtgaaatgggctcatttgcctttttcgtttttattttcagaggcgactttatgttcagaaaatgagtcctcctgggccgtggtcagttcttttcgctgcgagttctgctttgagtgtgggcagcatgtgtccccagcaccatctgtacttctctctcccgcccaccacggggttctcagactctgccggaggcccaagccctctgtcttgggggcaatctgttggactctgcagcatccttagtttacagatggggaaacagaggccggaggggctgagtgatggtccatgcgacttggacaggcatggccaggatccgggcttggggctcttcctgcccttggacccctgagtctctgtggacagagtcagctggggtgctcttgactgtgtgctgaccctgggtgtgttggggtgcaaatgctgcctgggccacgtgtgaacgggaagggaggcaggcacctcagatttccagtctggaccaggctcggggtccccctgtcctctcctgggctgtggcagagccagctcctcctgcatgcccaaccctcccggcatggcctggcctttccagccctaatggtggcccgtttcagtggctccgtgatttgggggtttggtgttgcccaggctccggcactagagggaagcagagaacccctgagtcatccttccgcagacaccccggaccccagctaggtgcctgtgcccagtgtccagcgttgcagtggggcttgggtggcatgtggggggtctgtcccacccattcctgtggtttcttccttggctctgcctggactttgcacacgtggtgggattaattctctggtaaacagatccgcctctgattggtgcaagacccttctctggggtcttggtgggaggatagaagttttctgcagaggatgaggaggcacagacgcccggttgttctgaggccggaacttggaaggaaactggaagggaaggaggctcctgccctctcctttgaggttacagctgggctgtggctctgcaaccctggggagcgcgtgggactccagcagcggccgtacagagggccgattccaaagtggcttctagaggagggagcaagtgccgtgtgcccaaagaggccggtgggccctggccaaacaggagcagccctgatgagcattgggtcccccgacctttgggctcctacctgactgcgcctggccgctggtctgttttgctcaccaagggttcttggctgctgccccctgacctggggctgaaagtcctaggagagggagggcctctgtccctcccagcattcctcaggcccaaggaggcgtcgatgctgctgaagtctctggggtgcacagaagcaatagatcctcacagcagccccctggggcgtgtggttccccagaggcagtgatgaggtcacccggggccgccaggcacctggtcggggagcagaggctggcgggctgtgcctgtctagctgtgacttgctgggtggagccgtgcctgcctgtccctccagcctgcccagccctggctgctcaaggctgaactgctttctctgccttcttggggcagggactcttggcctgggaagcagaggccattccacgggggggctcttttgcctcccagctacctgcaaagccggggcctgcctcagatgctcagcactgggcacctgctgtgctggggcacttgggacgcagcagctgagaccctgctcttgtggggaagacattgtgcaaggtagatgatgaaggggcttccgatcataaggaaacagagccgcctgggtggacccctgaggggtgagctttgagctgtgggaagaagcaagtgcataggtgcgaaggtcctgtggtgggaaggagtcgaatctgggaacagaaggagcccagggcagtgggagtgtggccagggagggcgcagtgcaagtggagatgagttagaagaggtaggttgaggcctaataacgcaggaagccacaagggagcagtttgggttttcttctgggtacagtgggaggcagctggagggttctgcttctggaggtgatggggtgttgatgttttcgtttgtttgttttttgaaacggagtctcgctctgtctccaggctggagtgcagtatcttgatctcagctcactgcagcctccgcctcccgggttcaagccattctcctgcctcggcctcctgagtagctgggattacaggcacgcaccaccacgcccagctatttttgtatttttagtagagatggggtttcaccgtgttggccaggatggtctcaatctcctgacctcatgatccgcccgcctcggcctccctaagtgctgggattccaggcgtgggtcttgatgtttttaagacagctccaactgctgctgggtgaaggattcagggatggaggcaggtctccaccaccaccaaggcagggccacgccactgcgcccgcctggagagtcggtgatgaaggagagggaggatcggagaattgagggatggaagcagggagctccctgttggatggtgtgggcataggctgcagtgggggtgagtgggcagggcagtgcctgggtggcctggtgggctcttcactgaggtggagagtgcaggagagtcccaccagggccaggcagacacgtgccctggcaggcgagcctgtgcaggggacacacttggtgggtggggcggcgtgcagctaccaggctgtgcccttgtgtgcagaggctgtggcacctgagctttctgagcatggcgtgtgagtggggatgctgaggaacctgcctggtgcgtgcacccgctccccattgccaggcagtgaagccttgggcctgcggccggggcggggccgcccttggacagtgcagggccggtggtttggctgcatttttctttctcacctgaccactcagtgggttcgcccatgcgtgcgtggctgcatgagcccctctgtctctctttgctcccacctgccttctttgtggccgcccggcgtgggcacctgtggtcagagcagcagtgaggatcccttgtctttgcccttccccttccccatgtggtttctgatggtccacagtcgggcgtctcagccttggcactgcggacctttaggacggcatcgttctttgttgtgggggcaccctgagcattgtaggaagcggtcagcacccctggcctcgacccctaatgtcagcagcacccccacccgcacctcatattcctagttgtcagttgtgacaactaggaccgtccctaggcattttccagtgtcccctgggggcacagttgtcctggttgggaatcgctgttctagtggcacctctaggcctcacagcaagcttttgaggtcagcctctgtaggacccaacttacagatgaggaaactgcgccttggaagttttgaaacctgtttggtaactcagacaagtgcaggggcgaggcgcaaccctaggagggagagaagctgctggaacccagctcctgcctggcggggcttcgtggctgcttctaccttaacttcagccggtgttctcactcccccttggggcttgaggtgtggcccgtgctgtgccttccttttattttgagctgaacctggggccccagccagtccttgcaggcacagctaccagcagcaggccccactgtaccagtcccttgctctgcgatggggcaagtcgcttggggcctctctgaacctcggatttcctctctgggagatgggctaacactagcatcttttctatggcttttttttttgagacagagttttgctctttcgcccaggctggagtgcagtggcatgatctcagctcaccacaacctccaccttctggtttcaagcgattctcctgcctcagcctcccgagtaactgggattacaggctcccgccaccacacctggctaatttttgtatttttagtagaaatagggcttcgccatgttggctaggctggtcctgaactcttgacctcatgatctgcccgccccagccttccaaagtgctgggattacaggcgtgagccactgcgcccagccttccgtggctttgaaaatgcttcgtaagttatcccaggccctttacgtacagaaagatgagtagataccgacatgcagtgtctgcaagggtcaggaaacaggagagccccgccttcctccccagcctaaacattgctcacccacgcttgtgtttgagtgtccctgagtagggcagctccttggtggccaaggcagcgctctggccccgatgatgtggggcatcagaacccgatagaaatgacgcagccctcgaggtgagtgtggccggaacccagctgccccacagccccaggcacttgtgttctgtgtccctggtctgggcagcggttcttgaatgcagctgtggatcaggaccccggggcctgttcttgcacattcctgggccccatctgcctttgcagtctgcatgggatccacatttttagcaaaaccttgcggggagatgtctgaggcaggggcatcactgcccatgtttggagaaggtgtgtgggttcaaagcttccatagcctcctactaaggaatgttttcgaggttctgagagctgggtcgggggggcactgatgatgccagggacagcctgctgggcacagccccaagacagtccttgctgtgtctccactcgcccccttcccaagggaggcctccgagacccttctggggccccctgcctccgctggccagagctcctcatccttctcagtggggtctgtgccacccaccgggcctttgttccgtcagcaccatgtgcccagtgcctcctacaggcctggtcctggcagagagctgggagtccagacagagccatctccctgacagaacgccatccagtggggcatcgggcagcgtagcgaggtgaggggctggcctccatgtggggttgggcctcgccaggttaagggctccaggcagaggcattggcaggtgccaggcccaggtggggaggatgcgagggattgaggcgctgtggggcatgggccggcaccagggtggacctgggtgtgcagtggaagccaggggtcagcagacccggccgcccccatggtggaggtgccacgagagggttgtgcacagaggctgccggctgccctcatccactcttcagacactcagactggcgcctgcctccgcccttgtgccgccatgctgctcccctgtggccagctctgcctcatcattaggtctctgcaggcatcccctccttcaagaagccaccctggcctttcccccatcgctgtccacacatcacagccctctgctgtcttgacttcccctgagccccccactctggtttatgggttggtgcattttggtgcctctcccatcctagaagctaagcccctcgagggcaggggctctgtggtctgctcctctctgcatcctggcagatatgtgagaaaggcgtcacagctcgagagtcagaattcaaacccaggcctggctccgcgcgaggcccttgttcccatggaggatgcagggtggacagcagaggcttctaacctggggagagggacaggaggcgccactgcggggttcctggcaggagctgcctgggcctctggacagatgctgtggagggttggccgtgtgggctgcaggtgtggccacagcagccactaggatggctcaaccttggaaggtaaacagtagtagagagggtgacgcagtgtagaaacttcccacacacttcccagatggggtggggggagcaagaggccctgtcgtccaggttttcctggtttccaccgttgctgtagggctgcaggatccactgagtgcacctgcctttgtgctggaagccagggctcctctctgaccctgagggtccctggctctggggagggagctcgcagggctcctctctgaccctgagggtccctggctctggggagggagctcgcagggctcctctctgacactgagggtccctggctctggggagggagcactgtgttttcagtgcccacatgttgccaaaccgcgctccagaaagctgcccagtttctgtccctgccgaacgcaggagaatgcagggaaggatgttgtactttttctccagagctgcttcccttgaggggggcccctgcctacaggtcagaaggaagctgaggttccaagtcaccccccaggcgggcctggcctgtgtaacacgcaggcgtgcaaggcagaggagatactgatgcccagggcacagtgccgtgccctggaagaccactccgtgcctcggactctgcagcagcttctgatgccgcggaggtggctgttctgttgcagacgggaaactgaggcttagcggcttgccccaggccaccgagcagctggttggcagagcaggcacacgccaggagagctgcctccctgagcctcatttccccctgtgctgagggctgggcatgctgttgtatggccagcccacagcaggcaggaagtgttggcctcaatgcgtttccacagtggcctgcccaggtagggttaagagcacagctctgaggccggctgactcctggcccctccacctcatcagctgtaggaccttgggcaactcacctggccccgtgtgtgaaatgggcctcatgatgggaagaccaagccgacggggtgacgcacccagtcacagtacgggtctccccccagcgtgggcgctggcgagtatggcagctgttggcgccatcatctctgtggtcaccgccattgcactcctttgctccagcattcacgcagtcactctcacatcctcacggagctgctgcaggccagagtccatgctggcagggacagaaagaaaccctgtgagggctgggcacggtggctcacgcctgtaatcccagcactttgggaggccgaggtgggcggatcatgaggtcaggagatcgggaccatcctggctaacacggtgaaacctcatctctactaaaaatacaaaaaaattagccgagcgtggtggcgggcacctgtagtcccagctactcaggaggctgaggcaggagaatggcgtgaacccgggtggcggagcttgcagtgagcggagatcccgccactgcactccagcctggggaacagagcgagactctgtctcaaaaaaaaaaaaaaaaacaaaccctgtgaggagcaggtgttggctgggagagcaggcgtgtacatgagccaagtgtgcagtgtcacttggtgggtgttgagtgtcagggagatgagcagggaagggggacagggctggcctcccagacatgcaaccaggacattcgtaccgggccctgctcttgatcgcatgctccgccgtcgtggcttcaaactctcaatcatttgaaaacaaccattcaagatttttatttttgcaccagctccggggatgtggggtgtagggctgggatgcgggggtgcagtctgggaaggccttgctgagaaggagacatggagtggaggagggagcctggtggttagtgcagacagtcagtgcgaaggccttgaggcggcagcatctggccaggtgctgtttctgtgcccatctgaccgatgaggaaagtcggggctcggggtggggggcggcacgcatcgtgtaccccactgttctcccagctgtattccccaactccgttctggccctaacctgctctgcttggccccacaggctgaccccgcactacatctacccaccagccatcgtgcagcccagcgtggtgatcccagccgcccctgtcccgtcgctgtcctcgccctacattgagtacacgccggccagcccggcctacgcccagtacccaccggccacctatgaccagtacccatacgccgcctcgcctgccacggctgccagcttcgtgggctacagctaccctgccgccgtgccccaggccctctcagccgcagcacccgcgggcaccactttcgtgcagtaccaggcgccgcagctgcagcctgacaggatgcagtgaggggcgttcctgccccgaggactgtggcattgtcaccttcacagcagacagagctgccaggccatgatgggctggcgacagcccggctgagcttcagtgaggtgccaccagcacccgtgcctccgaagaccgctcgggcattccgcctgcgccctgggacagcggagagacggcttctctttaatctaggtcccattgtgtcttgagggaggactttaagaatgactgagaactatttaaagacgcaatcccaggttccttgcacaccatggcagcctctccttgcaccttctcctgcctctccacactccaggttccctcaggcttgtgtccccactgctgcatcgtggcggggtgtcacagaccctctgcagcccctggctgccctggactgtgcagagatgcctgactccagggaaacctgaaagcaagaagttaatggactgtttattgtaacttgatcctcccgagctgtgagcgcagtctgaggtgtgaggacacggcctcctgttggagtcccattttctccatcagggcacgtgggcggcttcctcaagcccggaggagctcccaggcgcacaggggccgccggtaacaggggccgccggccaaaggcccctttccagtcatagcactgaagttgcaacttttttcttgtaattgttttgctactaagataatttcagaagttcagtctattttttcagcggatactgccgccaccaagaatccaaaacctatttttgacttggagagacttgcttttgttggttccgcccgtggagacgacgatagtgtttctgtataataaagtgtctgccggctcgcgggccaggatcctctcggtgggatgggcaccacagacaggaggcccctcaggcccgtgcgggccactgtctgctgccgcctgccggggtggcagagtgagttgtctcaggaccccgtcactgcgacgttgacactcctctcccttcccttcctccccaactccccaaacactgtggaaggggagaaggaagtgatccacagcattcaggccacttggggtctagaccatggtggtgccagcctggggggggcagtggccctcagctctgcccgctggagcggttgagtgcagaagggtgcgcctcttccctctacccccgcaccacctgctgtgtgccagcctgagacggttcctgcctgtcttgggggttggtggagggtggaggcagttctgccagccgtggcagggctgctatggggcatccagggctgtgggggtctggaggaggggacatgaggtgagaggtatcctggccgagggcggggggcagcggggggtctccctccggacctacctcagggagctgagcgtgcaggcgctccagggcaggcctgggacagagtcaaggctcagagaataaaggtagctaatctcatcataatatttttattagaatgttctgatgataaaaataaaacttgttttctttaaagaaaaagttgatctaatttttctcaaaacgcagagctcccctcgtgcctgtgggcatcacccatgccccgccctcctggctcaggaacccaggatttcactggcagccgtgcatagagcgcctggcctgcaccggccgctgagcctcagtagcagaacagacgcagcccctcttcacacccgctaatgcaggggaggcctggcgtcccagccgccgtgcatcatccagcatcagcttcagacccggagaggactgcgcttgggttacttcttggcgctgtggctggggaggggcctggacgtggattgtgattggcagccccaccagatccctgtggaataggaggacagttcccccagagaaggggggttgccaccagaagaccctgaatgtgggttcctgagaggacgttggcaggtgtccaggacagctgcccttagggtagagttgggagggaagccttggtctggggctggatagtcccagcatctggaactcagagctggggaaatcacaaggccttcatagaggaggtgtcagggctggagaatccatcaactccttccttgaattgctcactcactgtgtcatcccgagacgtgtgctgggtcacacgcaaagcgctggggatagagcagacagggctgccctttgggtttatcatctgctgggggagacacaacaatgccccagggtgatggagactgacaggtttacggcagggaggggatagggattctgtgggggtctgcacttcttcccaggccctgccggctggcccctccctcccactgtctcagtttgcaaacgcttgtgaggggtcagggagggcagcatggggctttcagcccggaggaggagacttgctgcagctgataagaacttggggatccacggaggggggctacgggtactgccagggttatcgtgaaggccactcgcagcctgcaagtttcctgtcactatcagctggtgacagcctctgggacaggccttcgggaaggccctgaggccttgaaaacatctcctgggtcccaggattgaaggctctggatagtgacaaacccaggagagggaatttctaagtcaccgagttgggtggggagaggggccggctgagggcagcagggatgcagagcgcggccaccagccccagcaacaagggtcataaaccccagcactgcagcaccaacatctgccgccactgactcaggtccccacgctgtgccacgcactttcatggatggtctcagttaccctccaggtatctccattatcagaccggtgaactaagatgcttaggagtggagcccacattgcctgggcccccaagagatgcggtgagaggggcttgcctggagctgaagggcgtgggcctgattgaggtggccggggtgtgcccagacatgcaggctgagcccagccaggtcctccccggccttgagcctcactgtgcaagacggtcgcaagtgtcctcccaaggcagggactttctgtcctacccactgtgttcctagcagccggcacaggcctgtgcccagagggccagatgtcatacacacatgcatgcagatgtatgtttgtgtatgtatacacgttaacacacattatcccagacccccatatgcacagacacatagacacacacacacacactgatacaggcatacctgtgcatagatacacatatccacatggacatgcatccacagacacattagcacaaacatgtatgtgctacacacacactcccactcgatattcagagatacatgcacacagagaaacagacacacactcagacacaccatcacacatacacacgtacacaccctggctcccacacagtacatgcacatgcacacggagatacgcttgcacacaaaattaccttcaaggcacacacagatgtgcacacacatatatacatgtggagatagacgtgcacacaccccatgtacctacacaaagatacacacatatgtgcacccagacacacatgtgcacacacgtgttgagtgacagtacaagacccacccccatcgtttggctccacaacaagtgagggtgttgcggggggcagcagccatggttttgagggttcattggcttgggagagagggaagtggagcaggtccaggccggaggactcggggggagaagagacgggcacagtgagggagttgccgtacctggccgctcacttggctgggcggcagatgttggctgccagtgtcctttggcgcgggggaagaccgctcattgccagccccctagtcctcgaaaaggtttctgtctggacattggcccaggctcggccagtgcacaggcaggcaggaagggccggggagctaacaccccagggcagccctcagcaggccagagggcagttaggggatagacgcccctcccttgccaccctcggcagtcactctggggtgtgtgccctgcgctggtgccctgagtccatgactcccccttctcttcactgcctcacgtcctcgatcccctgctgtgcttccagggatcccctcctgaagcagctgcctgtggggtttgcacacccagctgagacggccgtgagagacctcaacgacggcagcgtgggccaggcactcaacgtccccgggagtggggtgcccaagtcctgtggggcctggagaagcgcctgcttccccttcttcaaggagctgacaaagcccagagagcctcagcagtgcagccagggccatcccactaggcgggctttgcccacaggttgatccacctctgagctgtcaccctccaagcaggcaagaggaccaggcctgggagcagaggctgagcgcaacttccggggcacgtggctgctgtgtgagccagctgggggctgggagaggcacgcaggatccagaggggcctgagaccccaccccgccccatggcattgatttggagacttcttgctggggaggggcagtggtgagtgagaggtgcttcccttagagccccattttcatgccactttccagttgagcaaactgaggcccagagaggaaaaaggggctctccaaggccattgggctgtcactccccttctgggggtgtaatcacagagggactgggctgggacaaggtgtgggaaccacagccaccgcagcccacgagaagaagccacacaatggtgaggtcacctccgtgtcacagccctggcttgctctgctctgccctggtggggagcttgcctggttgccatcctccttgaacctcaccttcttccctgcatgcattgagctgacccctgggtagccccgcaggtcctgccggcccagcatccactcccttcctggtgacagcacctgcttttccttagggagctgcccccgcaccaccctcaggccaggtggttcaatggagccacctctacccctggctctgcagctcaaatagtcagcatattctactcccctggaccctcagaatggttcagggatagacgtgtgacccagtgtgggtccatgcgagtcagtcctcctgggggaggaaagctgtccctctgctgaggaagccaagctgggagcagataagcctgaagcagctgggggcagagaggagtttgtgcttatggagaggctgcctgagaaggaagccagcccaggagaaaggagagctgaggaggagagaggagcagagatagggtcttggggacatctctgggggcttttgatccagctatgcctgaagttagatcctggacctttttaatttgagagctaatactttcccccttttacttaagcctatttgatttgatttttttgtccctggcaaccaagactctggacatatacaacctcaaagggctggcattacttagaattaggttcagcaactgcaatagaaagtccaaaattagggtggttcttagctacctgtaatgcatttatttttctcatgtaaaataagtctgaagcaggcagtccaggacttggatgacagctccacagtcatcaggagcttaggccccttccatcatcccagtgaaccatttcaatgcatggcttccttccttaagaccatcttggggaccaagatggctgctggagctccagccatcatgttcaagtgccaggcagcagaagaaagaaaggggaaggctagagtatctcaagccgagacttctcgaggagacttcccagaagttgcacacaacattcctcttccatttcgttggccagaacttagtcacatggccatacttaactgcaagggatggtggggaatgtcggtgtttagctggggatatagctacctggaacacagaaagccttctgctaccaaggaagacacgggaatgtccttatgcagacaacttgcagtttctgcctcaggtccttccagcagtaagctttgagtccatgagagtcatgtcccattcatacgtgctttatggagactgttactgaccaagcctgttacctctttaccttcacaccagtggggtgcgctgggtctatccttatgcccatttcacccagggggagatcgcggctcagagcgctcactgcacatggcctgaggtcacctggttccttaggggcagttccaggaggacagctcgagcttctgcctcagtgaggtgttggaagtttggcaaacagttctcatcggacatggctgcccacgttcctacaggaccggcggcccaaggtgccttcgcattcatggtccttgagtgggagctgggcctggggccaccaggaggtgccctctgatgtgctccagtgtgctggcttggttccttctccttagcatcctcccacgaggagtggagtcatggtcccattttacagaggggaagacaggctcagagcggggaggtggcctggtgaggaatagctgacccatccaggcttcgggcccgggtcggtctgcctccaaagcctgtgttgttggtctttggctatgtggcctctggggagcttgcgtggaacaccttgaccagggctcagtcctgtctcctaagccccacccatgcctccttcaggggtgcagacccccagcctgggccagctgcaggcagggccaacaaggggcagcaggaggggctggatgcttgggccacctcaggcgattgactgagcccggatgttccggccacctcaggtgactgactgagccacggttacatcacctagaaatgggttaataaccaaggtcctgcctcccagggctgtggccgggattacaggggatgagttaggtaaggtgccccgtgcagccctggtgtggagtaggcgcccctcagggagccctcagcccccactgctagcagggtaagcgaagcgatggagggtgggtttgagaagacccctgattcctggaaggccacccgctgtttttcagggtgctgcctgaggatgacggacccatgctgccaatccaacaagacaaaccctcctgcttcagtctccccacctctggaaccgaggttgtcctcaaagccccagaatgcatgaaaactggcatttattggagacctgccatggctttacacctgtcatttccctaaactctcccagcagcctgtgagaagttgactgtgcccatttcacagatgggaaaaccaaagctgagcagatttggccgcctgctccaggccagagagctggacagtggcagggccagggcagagctgggggttggacccatgcatcctgaacctggagccacacgccgctgcaccctgaggactgggttctggccaccgcacccatcctccaccttcctcagccaaagtcagccgggcgtcctccccacccctgccctggctgctgagtcacacttgtgtttgttccccagagacgtaaacatccaaccaggagccccctgggcaggaggttgggagccctccagatgctgagcgaataacaggggcagctctccagcgtgccccgaggctgggtgttgcatagggcacagcctggggtgggcacctgggcttccagatacctcctgggcctcccgcaggggccgataagtgtctggctctgcttatcagccccgttgccctgcctgctcccgcctcaagtcctggtgtacacattggggtgcacggtggcctggagatcatgatggggtgaaccaccctccgcccacagcccggcccaccagacagctgagcctggtgcagcagaaacaactcagagggttcccgggtgcctcctgctggctccctgctccagtgatgggggcgtttttagagaaattaaaataaagatctttttttctaaattataaaattaagactgttggggggaaaatgtgactatttcctttaatttattaaaataatctgcatatgtgtataaaaaggagtggaaggaaagagaccaggtgttaatggtcgtaggaggacaggaggcttttattttttcttaacacggctctctatttttcacagctgagaaatgaaagccagcgaatgaggcttggcgtttggtcatttgctcttgcatctgtgtgtgcgcactccagacgctccagaggttccagtgggtggtgtctgtgcccctctcttctgctgactttctgggtttctctgataggcctgagcctgcagcggggtggggttggggtccaggcgcttgtctatgggaacccgctctgtcttcaaccgtgtgactcagaacccagtttcccggcacacacacaatcacacaatacaagccctctgtgactctccactaaatcccacttccttgcacagcctccacggccagggcgaactggccctgccacctgtctgatcctgagagagagagagagagatggagggagtcactctctccttgttgtccctgaaccctaactcaaatgtcagccttggagatgccttctgggacctccctatctaagctatcacctccaaccccatccttgttctctcatttgtttttctttccaagcagctgtctctgggataagggcctggcctcagagcgtcctaggcatgagtctgggctgcctcttcttcctcctccctgggcctgacaacctcgctcctgggaaatgggctgagcctggggttcctaccctcccacgcagtggcaggaccgtgctccccagcagccagcgtgccctgggatggctcgccctgcgcaggtgtggacagcctctgcccagcttgcaagcacaagccctcctgaaccacgggagagcggaacgtcaccaaaggctgcttggctcccacaggcctaggtggaggtgtggcccatgaaggccacagtcctgaatctcaagctgaggtttagcaaaagcctgcaaggtaaccgggggcgtggggagctgtagtcctcatcctcagggtgggcagggcagagaagcctgaacttatccagcactgggcttgtgccaggccctgtgcccaccactcagcagcatgggctcatcaaatccacacaacaacccactttatagatgcagacactgaggctcaggctagtcagggagttttcccagggtcacacagtgagtagctggcagagctgggctccaaaccccgggggatctgatgccaaagctgccctcctaacctgcagctggggtctccatgggaggagacaatgacctgtattctggtgtggccacagggagaaaggccacagagccactaagaatgatactgtggaagtctatttcccgacacggagagatggccacagagtacggtggaaggaaaaaagccaccatgaacagaagcttctcacaatgctgggcccagagttcctcacagcagcagtgacacccgtgctctccagtttgctccagtccccaccaatctttactgtgcctctcattgaaccctggcaggcattttaacttgtcggttaggagtcacaggagagccaagtagaggaggaagcaggaaccgtgtacacacgtgctttatcccccttgacgtctttctagaggacagttatgcaattatgtgacagatggagggagggagggactgaagaaagggaaaaagaatgggtggaggaatggatagagatgtatggatggagggtgaatgggaggatagatggatatatgcatggagaaatggttggggaatggatggagggagggagggtgaatgggaggattgatggacagatgaatggagaaacggatagagggaaggagtgtgaatgggaggattgatggatacatgaatggagaaatggatggggaatggatggagggagggagggtgattgggaggattgatggaagatgaaatggagggagggagggagtgatggataaaggaagggatggatggggggatgaatggaaagatagagatatcttcaaccttggtccctactccagcagagttagctttgcctcaggggatggtctggtacaagggttaatcattcaagtgtttggaatcagacctgaatgtgaatctgagtttctttcctgacaagctgtgtgaccttaggtaagtcactcaccttctctgatcttcagtttcctcattattagaaaggaaataataatactagataataataataatagaataataatccacattctatggatttgcctattctggacatttcttaagaatgtccatgcaatatgtgatcttgggggtttggcttcttttattttgcatcaggttttcaaagttcatccatgttgtggcatgtgccagcccttctactccagcagagttagctttgcctcaggggatgatctagcacaagggttaataattcaagtgtttggaatcagacctgaatgtgaatctgagtttctttcctgacaagctgtgtgaccttaggtaagtcactcaccttctctgatcctcagtttcctcattaatagaaaggaaataataatactttgtagtgcctcctagaacacgaagtagaacaagcacttagggccaggtttgagggagaagttgaaggtgggcccacctttattaggatccgtgctgctgctacggtcctatcaaccctgccctgagaaagtgccctctctgcttccgggccctttgtgttgagctggttaatcgctcgggagactcgatgggttccccacctccccacccccagctctgaggatcttgggatctcgctggactggtgttaataccaatagcatccccttgctcactgcctccaacctcgaccggactctcagaccccgcccaaagccacagccgcatcttcgtgaccatgacctgagaaggctccttgcagccctgccgcagagcaatcctgttatcagggcttccagccctggctgcacctgagaactgagctgcaggagctgctaaaagcaatgctgcctgtgccccacccggaacccagtctttgggagaagcgcctggcatgagtatttttttaagcgcttctgactgatactaaggcaaagcctggcctgagaataaaagaagctctgtgtttagtttcttttctttttaaaatgtttctattttttctttacttttctgtttagtttcttcggcagtgaaaacagactctgctgtctgtagttggatgaagaattcacgtttgttttcctttcagggttttgatgggtcagtgtaaaatatgttttttgttaatccccttgggttacagctggttagagtagggggttgggagccccttcctcttactttacagggctccaaaatcctccgcagagtacaatgtggggctgaattttattataaggtaaactggtttaaaagaataacactaaacacaaatcaaaggaaagagatgagctaccacttcgcattcactaggatgggatgaaaaagtcagagaaactcaggtgctggcgaggatgtgggggaactggacccccacacacactgctgctgggaatggaaaatagaaaaaacaagctggcaggttcttcaaatgattaaacagagagagctaccatgtgacccagagagtccactcctcaaaaaacccaagagaaataaaagcttccacaccaaaacttggacacaaaggttcttttgtttgtttgtttgtttgtttgttttatactttaagttctagggtacgtgtgcacaatgtgcaggtttgttacatatgtatacatgtgccgtgttggtttgctgcacccattaacttgtcatttacattaggtatctctcctaatgctatccctccctcagcaccccagcccccaacaggtcccggtgtgtgtgatgttccctgccctgtgtccaagcgttcttactgtttggttcccacctatgagtgagaacatgcgatgtttggttttctgtccttgtgatagtttgctcagaatgatggtctccagcttcatccatgcccctgcaaaggacatgaactcatccttttttatgcctgcatagtattccatggtgtatatgtgccacattttcttaatccagtctatcattgatggacatttgggttggttccaagtctttgctattgtgaatagtgccacaataaacatacgtgtgcatgtgtctttatagtagcatgatttataatcctttgggtgtatacccagtaatgggatggctgggtcaaatggtacttctagctctagatccttgaggaatcgccacactgtcttccacaatggctgaactaatttacacttccaccaacagtgtaaaagcattcctgtttctccacatcctctccagcatctgttgtttcctgactttttaatgatcgccattctaactggtgtgagatggtgtctcattgtggttttgatgacagaaaggttcttaacagcactgtttgtaatatccaaaaagtgaaaacaacctaaatgttccccagttgaagaatggatccacaaactggcatatccacgcaatggaaaattattagccgtaaaaagaaatgaaggaccggcacacaccacaacatggatgaactttgaaaacctgttgcaaaataaacgaagccaaacacccaacagcacatcttgcatggacattcttatgaaatgtccagaatagacaaatccatagaatatttcaaaaaaaaagcaactgaagtcaccatgggaaaatcagaattctgtgggccttccctatgcgtatgtatagcttaatatctcttttattttggatggtgtgcatggcggggtgcttcattcttctccctgtttgtccccaaagtctccacttggcaggaatactgggttggaggtgaccaggggcaggcgcatcccgaagcagggagtgagccacccggcggtgcccccaggctacactagaagccttgacttccagttttaccaaactggggaagaactcagccaagttcacgtgagcagcagggtgctgggggcgggaaactgggagtccggttgtgccgtgttgagtgtgggctggtgggcagcaggcggtgcctggagcatgagctgggctctgggagggtgcaggctacaggggccgagggcgctgcattgagcgggacggatgggtgatgctgccacaagcaaacccccagggcccagtggctgaaagcacacaagctggttctcatccaggacacgcctgtggaagctggaggccattccgtgtcactgtggccctcagagcaggaccccggacaggctgagctggggctgaagggaacaacgtggtcatgatggtggagggaaggcacacagtggcctttgtgcctctgcctagaagtaaagcactcatgtcactcagcccacgtgttatcagagccagtcatacggccaaacctcacctcctaagggcgggaggtgcagccctccggtgtgctgaggggagagagagcccccagagaccactccaggcatctccagcaaacagaggttgtcaccaccctcagccggcagagactgcctgtggaatgagtgcaggtggaggagaggggaagatgatccctagctgggacccaccctgtgtggggctctggagggaaggaaacagccctggtcccagctccttccagagccgctgacccagccaggttgcactctgcgggaggtggcccgggagccgtgctgcccctaacctcaccctgaagctggtccttccaggaggggccgcctcctcggagagaggagatgccatggagaggccagggaaaccgccacggggccgtgtccagcgcttctccagccaatactcaccagaaacgaaagaggttccagggtgatgtgattggggtctgtctgccctgctagactgtgagctccaggggctcagggccaggccaggctctgctcaccaccattgtcactccagtgcccggcaccctgcctggcatgcacttggcactcaataaatgtctgcggaaggaatgatgcatgaggagtcctgagtgcacaggtggccctgctgaaactccttcccaccgcggggccttcgcacataccgtgtccactgcctggagcacctccctgcaggtgttgatgtagtgccctcctccacccaccctctgacactgcctgcctcctccaagcgcttctcagggtttgtgccactcagtgcatttattcatttgctcattttaacatctgcctccttcctgaacgtgaactcaggaggcaagggtgtttccgacccatccatgacagtgcccagccgcccgtccagtgtctggcacaaagtagggaacttacaatagttgctgctcatgtgaattctagagaatttaaattaaacgaccttccaagcttcaaagtcagccgaagcagcatctgccacccacagtcacctgcgtcgggtgagtcctcatgagacagtgcactgggggataggaatgctgcagacacagacttgggccctgcctggagctgccctgggaaaggcctgtgggggtgcagccaggccccctcccctgttccctgctcctggggagtcttccagtagagttcagagatgcccgtgcgagggtaggatgtggaggcctccctctgagatcctcttgggacagccttgctctccttcaagggccacaaggttcaattttgaccatatttgcctcagagaaaaacagccaccccgtggggtcgtggtataaataccagtttatttactctgattctcagcaaagcatgcttccaaggagcaaaggtttcctgcttgctagtgtacaattttggaaatgtggccctgggacaggagactgtggcaggctcggctaaaggcacagtgggggatggggtgcagtgtccgattatgggggtgctgctccacccaggtcacctcacagagtgccttccctccggaaagtaagacaaggaaaattcgagaatagactccctggccctctgcactggggcttccgaggccaattaccagacagcctggaactgtgcccaggttttccttgggggaactctcccttctctactccaggtccctgggtctcaggtgagtccagttctacccctggccctatgggggtgggcgtgaggcccaggcctggccaataagaacattggatgccactggcctcagtaatgaactcaggaatgggcacatcatccagttagagccaatgagataccataaagtttatgctggggtggctgggagagaggcaggaccccttttccatggacattaacctggggggttagagtctgaagctgccaggatgaccctatggaccctgagcatgaggctagtttgggggatagcaggtgtgggaaacagagaaaccaagtcccggtgacagtgtttaagctgctggatccagccattcctgaagccagaccagtgagagagcaagtcagttctcttttttcattaaactagtgtcttgattttctattatcaacttatcaccaacttagtggcttaaaaaaacacttatctggccaggcatggtggctcacgcctgtaatcccagcactttgggaggccaaggcaggcagatcacctgaggtcgggagtttgagaccagcctgaccaacatggagaaaccccatcactactagaaatacaaaattagcagggtgtgatggtgcatgcctgtagtcccagctactcaggaggctgaggcaggagaattgcttgaacctgggaggcggaggttgcggtgaaccaagatcgtgccattgtactccagcctgggcaacaagagcaaaactctgtctcaaaaacacaaaaacaaaaacaaaaacaaaacaaaaaaaaaccccacttatccattatgtcacaattttgtaggtcatgccccaaaagggaccttggcttgaggtctcttgaggctgaaatcaaggtgttggtggtgctggattacttactggtggctctggggaagaatctacttccagcctcattcagttgctggctgaattcagttccttgcatttgtaggactcaggtctcccttccttgctggctgggagctggggcaggtctttgccctgggggactgccaggttccttcctgcactttcgttttcctttttctttttcttttcttttttttttttttttgttaagatggagtctcactctgtcactcaagctggagggcagtggtggcattgcagctcactgcctccacctcctgggttcaaacaattctcctgcctcaacctcctaagtaactgggactacaggtgtgcgccaccatgcctggttaatttttgtatttttagtagagacaggagttcgccatgttggccaggctggtcttgaactcctgacctcaggagatccacccacctcggcctcccaaagtgctgggattacaggcgtgagccaccgcgcctggaccgttcctgcactttccacgtggccccaccagcaacagcaggtgagcgcctctcacactcaatctctgcagcttcccttttgctacccaccggtctctgcctccagctggagaaagttcgctgccttcacgggtttatgggattagattggtcccacctgtataatccagacatcatctccctatctggaggtttataaccttaatcacatctgcaaagttcttttgccatatgacttatttacgagttccagagattaggacatggatgtcttggggtcattattctgtccaccccagcagtttgacttggggtttctgtcatttggtagggaacccgggaacagctccacctggactggctgacccttcctggagaatggttggactggattggctcatgcggctataaagttctggcaggaatgactgaatccagcagcttagacactgttataaggacttatattctcaccattctcagccagtgttggttctgtgccaaggctctacaggtgcccctggctttcccactctgggttagtccacaggaaagaaaatataacttgcttccattggcccctaaaacaaatttaaccctttttatcatgcagggcagtctttttgtttttttgttttgttttgttttgttttgttttgtttttttgagacggagtcttgctgtgtcgcgcaggctggagtgcagtggcgccatctcagctcactgcaggctctgccacccaggttcacatcattctcctgcctcagcctcccgagtagctgggactacaggcgccgccaccacgcccggctaattttttgtatttttagtagagacagggtttcaccgtgttagccaggctggtctacaatctcctgacctcgtgatccacccatctcagcctcccaaagtgctgagattacaggcgtgagccaccgcgcctggcctattttttttgttctaaaactctccatcctgggttggactctggctctccctttgataagcctcataaccactcaatatttcccccctaaatgacagtgcattaagccccaaagagtctccttttgttctttccacaaatgacacctgagctgctcctctgggggtggggggaagcagcagggaagcagtgagaagctgggcgtggctactgtcctctgggaactcactgctcagcactgagttacagagtgtgaggagggctgtgaaggaaacgggcaggtaggatactggagggtcaggaggggccaggtgggaggcagggccagcagagcctggggagaggtcccacagtaaggcacaggggaagagcattgcggaggaggtggtggcctgtgcaaatgcctggaggttggacatgctcggctacgctgaggaactgcagggaggccgggagggcaggagcgtggtcagggagtggaggctgaggctgccagctggggaggggcccagatggggccgcatgacttcatatcctcccaccctcttacaacacagacactgctggcggctttggagtggcaactctctgggggttggaaacaggggtcctgactcctggcaacttcctcccctcccccagcacagctgcacttgacacggagaccatcctagcgtgacttccagtctcacttgcacccagtcttccacagagtacttgagacctccccggatctcccccctagcacccgggcgctgcagactgcctccaccacaccctgcgcccttccgctcccagaggagggggagcaccattgttcttggtggagaagtgggtgctgggatggttggcttcgtgagaagggggaggacagataggtcccactgagatggactccatatcccctgctttgcaccctagcctctgagctatccagccttcagacatcagcttcctgctgctaatggtggtggcatttcaatttttattttttagaacggggtctcgctatattgcccaggcaggttttgaactcctgggcccaagctgttttcccgcctctgcctccctaagagctgggattacaggcatgagcccccttgcctggcccggtggtggcatttcaacacagagaatgagcccagcttcaattccctaggtattgataggatccaggagactgtcgtggaaagtctccctcccatcctgtcccttccaattctcttctcccgaggcgtgcagcacctccagctggggacactgaggtctgcacagatggatgtttactcttccccgcttcgagcacaggccatttgctctgcacggcacctgtctctttcccactaaatgcatcttgaccaggccccttagcacacacggggcttgctctttctttgccgtcagctgcgtgctatctgtggcgtgcatggggcaggtggggtgggcgttcccatccccagcgatggaggcaggagctctttcaggctcacctggaacacagtcacatgtgctggtctgtcggcatcacctcagcagtgagcccatctgtgggccgtcatttcatctgcaccttcctccttagtcctcccacagcacccccaggagggcatggtgggatgcagagacactggatctcaggccacactttcctgaatttttccccaaattcagtgacccagcaggacctgtgcctcctgacgtggtttcactgttatttctagagtctcccaagggggatcccctaggcctccaaaccagcctcagaagccactgtgggtcctcggaagtcaccgtgggtccttggaagccactgtgtgtcttccctgccctcttcccactatgctctcactcgcctgtgcctgctaccccaaggctctggagaaggctgcctggggcccccatcccaggacaccagtgtccacaccaaggtctctacctgcaggcagctgcagagctctggcccctgggaaggtcggggaagggagcctccttccagtgtgcagtcctgagccacctccccgggtccctactgaccatcacagcacccacctcactgctacccaccccacagcaaggcctccacggcatgaatggagacagtgggcctgtgggggagggggttagaaacagcgtcatctgttccagcaggagctggtcatgctgcagggtgggcgcctctgacaacttcaccagccccaacctctccctctaaacacattcattcaaccaatctttccccatttacttattgaacaccaaccaaatacaaggtcctggtgagaagacaaagatataagtcatttagctgggcatcatggtgcatgcctgcagtcctagctactcgggaggccgaggcaggaggatcacttgagcccaggagttccaggctgcagtgagctatgattgcaccaccgcactctaacctgggtgacagagcgagaccttgtctcttaaaaataaaaaagccatgtaagtaatctctggaataatgtttaacttcagtctgataaatgccacagtgaagtgctgagcctgcccaggcagcgtccctgcctcaggccctttgcacgtgcagttccctcagcctgaatgttcttcccttaggtgtccacacggctcacctcttacctcctgcaggtctcttcatctcactggctgcttggttcaagttgcagcccctctccccggcctgcttgacttttcaccatagcccttgtcactcctcctggcctttgcttgctctaggtgctgctcacttgttgcttgtgtgtcatttatgtgtgtgtggattgccggtccccccaaggaatgtgaatccaggtggcaggcattctgtctgtcttatttgcagctctttccccagtacctaggcaagtccccaatacataatagctgctcagtaaatagctgctgaatgaatgaaccgccttaaggcatgtgacctgttcagtgattcagcagctcaggaggaagatgtcaggggacattttcccaccactggggacagactcaggtttttgtttttttagtttagtttgtttttttttgttttgttttttttttttttttttgagacggagtcttgctctgttacccaggctggagtgcagtggcacaatctcagctcactgcaacctccacctcccgggttcaagtgattcttgtgcctcagtctcccaagtagctgggattacaggcacccaccagcacagcagctaatttctttttttttcttttttttttttttgtatttttagtagaggcaagatttctccatgttggcgaggctagtctcaaactcctgacctcaagtgatccacccgcctcggcctccccaaagtgctgggattataggcgtgagccactgcgcctggcccaggctcaggtttttcaaagcctgaaattatgtcaattttggacacaatctttaagaaaaagagatacagttacatgtacagaattagggccagggcctttcccctaagctaaaacttggacagcctcagggtgaaccccatgtgagctaacactgaaagaaagactggcgctgatgacaggaaccttcttccaggcagggggaacagccgcggaaaagcttcgaggtggcaaagagccgggagagttctgtgtgactgcagcttggcaggggatccaggagaggctggaggcccaacaggccggaccaggaagtgccaggtatgacataatgtggccttggtctctcaggagtccagagggcaagcctggcgagatgacccttgggttccagcaggactgagccctctgccagccaacgttttcctattcattccagtggccccagccctccctgtcggctgccaggaatgtgtcactcctgcttcggggtccctgctgccccctgccccactcagaaagatcccttggggctggttggggaggcagcctccccctcctcctctccctgagctctgctcagaataaaagctcccggggtcctggctgaggatgctgtgccctcgcccatccgtggccactgccagccatttgcatcacaaatgaggcacagtcgtgccgttgggcaccagcctggtgctaccctcggtgactcaaggacacaggccaggatccagctgctgaacgtgctgccttgccccacccccagccgcctaaactgtgtcgctggggaaggatgccccggtccccagcctgcctgggatcctcctggcctgggcagctctccccaccagccaggagagcaaccatcgtcggggtgataaacccaacgctgggcaaggagcgctctgcatgtcaggtgggaactcagcacttggcagacattctctctgttagctttcacggcagcctgctttacagaggaggaaactgaggctcagagagggtgagtgacgtacccatggccgctcagctactcagctatactcagtagaactggggcttgaactcatgtcattctactctagaaactgtgctgtgagcaccggctgtcccttccaaggccatccgtgcttaccctgggcatgcaatagctgtgctctggatgaataaaagtgaccaatagctgcgcactaggtgaatataagtgaccaagagctgtgcattggatgaatataagtgaccaatagctgtgtgctggatgaatataagtgaccaatagctgtgcactggatgaatataagtgaccaatagctgtgtactggatgaacaagtgaccaatagctgtgtgctgggtgagcgagtgaccaatagctgtgctctggttgaataaaattgaccaatagctacgcactggatgaataaaagtgaccaatagctgtgctctggatgaatataagtgaccagtagctgtgctatggatgaatataagtgaccagtagctgtgctatggatgaatataagtgaccaatagctgtgccctggatgaataaaagtgaccaatagctgtgtgctggatgagcaacagtgacacagaacgagaagtgagaagtggagggagtcggacggagagaggcaaaggtggagtagtcagcgtgactcagaggcagtcactccaacagaacatgaaagaaaagcagaaatgcaggcaagagagaatgagggagacaggcaggagagagagtgacactgaggtgaacagagaggggcctggggacagggtctccttctggggtgacggaaatgttatggagttagatcatggtgacagttgcacaactttgcatacacactaaaacccactaaattgtgtacttttgttgattgatttgttttagagatggggtcttgctccgttgcccaggctggagtgcagtggtgtgatcatggcttgctgcagcctcaaactcctgcgttcaagctatccctcagcctcccaagtagctggtgaccacagacactcaccaccatgcctggctaatttttttttgagttggagtctggctttgttgcccaggctggaatgcaatggtgcaatctcagctcaccacaacctctgcctcctgggttcaagcgtttctcctgcctcagcctcccaagtagctgggactgcaggcacatgccaccatgcccggctaattttttgtatttttagtagagatggggtttcactatgttggccaggctagtctcgaactcctgacctcgtgatccacctgcctcagcctcccaaagtgctgggattacaggcatgagccaccgcgcccggccgcctggctaattttttaaaaacgttttttttttctcgagacggggtctccctatgtcacccaggctggtctcaaactcctgggctcaagtgatcctcctgcctcagcctcccaaagagctggcataagccactgtgcctggcctaatttacaaacttaaaagagcaaattttgtggaatatgaattacatactattttaaaacacaagaggacatcaggcaaacccgaactgaggcacactttgcaaaatacgtaatactcttcactatgtcaaggtcacaaaagacaaagaaagcccagggaaaggcccctgggtggttgcagtgtgacgtgagatcctggagcagaaagtggacatcaggaagaagctgtgagtcctgaacgtgacctatggtctgattcatattattgcatcggccgggcacagtggctcacgcctgtaatcccagcactttgggaggccgaggcaggtggatcatctgaagccaggagttcaagatcagcctggccaacatagtaacaccccgtctctactgaaaatacaaaaaattaggcaggcgtggtggcacgtgcctgtaatcccagctactcgggaagctgaggcaggagaatcacttgaacctgggaggtgaaggctgcagtgagatgagattgcaccactgcactccagcctgggtgacaaagcaagacttggtctcaaaaaaaaaaaaaaaattattgcatcaatgtgaatgccttagtgttgctgattgtcctgtggttttgtaaaatgctaataggaaagaagctgggtgaagggcgtatgggaactctctgcacttactctctttgcaccttttctttctttctggagatggtggtcctggcttgccagggtcaagctcagggcttgagtgggattacaggcataagccacggcgcctggcctcacctgcctatttatgattacagcaatttgcaggaccatagttttgtgtgcaccagtgaaacagctcacatgagaatgatctgcgctgtgcacagtgcttcgattttgtgttttccactgatgacatgttgaggtccagggaggaggggtataggtgaggcccattcttggaagagcagcccccacccaccccagggctcagccctgtcacacccgtcccccgaggactggcatttgggcatcatcacctttttactactttcatcaccttcttcaaacgggccatccgtggaactgcagcagggcagcgggtcgggggtgggggaagcgtgggcctgggctgggggtgggcttgggggctgtgcactgctctgtaggctccccgaggctcctctgatagaaatcatcctatcaggatgcatgatccaggacagtcacgcagggctcagaagccaggacagtcactcagggctcagaagccaggacagtcacgcagggctcggaagggccctgctcagggtttcctgctctgctgttaccatcttgaaattcttctttctttttttttttctgagacagagttctcactctgtcacccatgggcatgatctccactcactgcaaactccgcctcccaggttcaagtgattctcctgtctcagcctcctgagtagctgggattacaggcgtgcaccacattcctggctaatttttgtatttttagtagagacagggtctcaccatgttggtcaggctggtcttgaactcctgacctcaagcgatccgcctgcctcggcctcctaaagtgctgggattataggcatgagccactgcgcccagcccatcttgaaattcctggtaatgtttcaacaaggggctctgcgttcattttgtcaaacttcatgtggacatctgacaacagcgagcaccttcggagccctggtcatgtgccagctctgccctaggccagccacacacactgcctccttgaatcctactagccgttctgttacaggcatggtcatcatcaacccattctgcagatagggaaactgagactcagagagctcctgattcaggcaataccaggtaacatcagctttgaaaatcaaatctggccaatcccttttttttcaaactgagacccagagcggctagagttggctcagggacacgcagcccctgtgtctcactgcagggttcccagccattccccagggaggaacaagagaccatctgccccccgggtgctttctccgggcctttttggaaggccccattggctgggttcattttgccacatttcctttcttcctggctggtggggaggactgtctcaatgaggggtgaacaaaccccggttttaatcagagcagccacttcctctcaccagagaagaaacccgccctctcacaacccactttctatatttagacccagggcctcgccttgagctgggccagggctgggtgtggcggggcctgcggctgcttccggctctcgggaaggaagtttccacctgtttcccaagagccagagacacgaagcctgcaggtcctaggctgagtgcaggattcttgagcccacaggggcccataggacagtagttccagcctccccctctgcagctccacagccatgtgggggacaaggcccatttccaggacaagagaagcccactcccatttcattcattccttcagggacctggtgttttctgggtgcctcccacaacccaggtgccgttctagactctggggatacggcagggaacaagacaggcccctgccttcacggagctgacagtctaatgggaatgacagaagtaaatacaataaaaataaactaataaaacagaaaccggatataactaaggaaaggtaatgaaggcataaatcaggcagatggaccaagaggcgtagtagagtgggcaacaccaggggcggggtcccagggcctctgcaggcccctggggtgtggaagggcctggaatgcagcgacagactgaacagggcttaaggcagagaggacagagcgtgctgatgtcacagccagggctcttgtgcctggtgtgggagccagtcaagctggagacaggggtgaggtcaggccctgcagggcccgggcactaaggcagaggtgtggatctcaaataccaagagaaaccacccagcgcttttgaacctagcgtgacatgcatcacgagctgtgtggtttttttaaagctcacccctactgtgatgtcaagaaagggaggcaaggggccaggggagggagtccaggccagttggagggggtccaggccagcatgaagggggttcaggccagtgttgagagggtctaggccagtgtagagggggtccaggccagcgtggaggggtggtaccccaatagtctagggcactggctctccactggggccattctgctcctcaggggatgttgggcaatgtctagagacattttttcttgtcatagtggtggtgtgctacaggcacctgataggcagaggccaggggtgctgccaagcatcctgccatgtccccacagcggagaaagatctggccccaaatgtcaaaggggtggcggttgagaaagcccggcctagcgggaggaggtggtggcgagcagggcgacagtggtggaggaaagtgatgtgccccgttctgggatccagggtgcatggagcatggatgaggagtcacttggcattctgctctgagtatttaagagtgacccatgagagctgtaaactcaagtctcaagtgtgggtgacctccaacacccaggcaagggttcgcctagcatgagctccgctgccgagcgcagtgtctgcaggactattctgcacacatctttggcagtgcccccatgtggtggcaagatgccccggcatcagtgaccttcggcagtcaacccccagcagtgggttaaggaagacttcggtgtccttggaagattgaaaacgagagaggactcgagaagggggttctgggcttcttgctaatagagaatctgggtacctgagtgattaaggagcaaagggacacagtcatctggggatcataaattgatggagtggcttattctgacttcattaggagttcccaggagagccagggaaaggggaggaggattgctgggttcaggaaaggcacctgtcacacgcgtgcctcactgacttgctcgttgctccaagaacatagtcaatgctccctcttctttgcatctccagcttcagtgctcttcagtttgtcaggcgcctgcagtcccaaccctgggagagcactcctcagctggcaggctccaaaatacccaggacgaggggaaggcaggaatggcgtggatggggcgggaggctttccccatctcccccagcttcaagcccttgtctccccttcctacttagaagatgcttccaatgtgggcctgccagctccagctgacagcaccaggcactgtcccagacaccacctgaaaaacaatcaaaggcagtgaacaaaccatgaatccctcaggaaatacagacagttaaacagtacacggaggaatgcacagccttgctgatcgaatgagaaaaaaaaatcgataaaacaagcccagtgctgcaaaggatgcggggaaaataacacatccctttgctgtaaacagattccgattttgaagatgcttctgtctgcatggaaaaagccccacgcagctgcctgaccccccgacctcgaatattatcttgaggcggggttctgcatctgaggaaataaccctcagcaggaaaagcgttcacagcaaccttatttaaactgagaggtggaaaaaagaaaacaacccagacgtcccttgctcacacttgtggagcgctcacactacgcgaggtgccggacacgcattagctctttgatcctttccactgctctgtgagttgtggtttatgaacctcccattttacaataagcaggggacacaacagaggccagccctccctccacagccgctcaggggctcagagctgaggcacctcagcgccacctggagcttgggttcccctccctccaagctgtttcttagcaacatgaggcaaccttgtctgcgaaagaggaggtgaccgcagctcctggggatgtgccaactctgggatgtgacgggaagacaaagggcttctgtccccttctgcctggcggtaagagagccggccgcccggcaggcatgccccagcctgtggttctggaatgcgggcaagccaccgtccccagagacctgtgttggtggccaggccagcccacacacccgattggcacatactcttgtgcttgcccaggagcggagtcagaccattcacgctgccttcatgggagttgaacagttgaactgatgcccttaaacccagtgtttccctctgggaagacgcccgggggcctcgtggttgtaggtgctggaaggatagctccagctccaggcacctgccacataaaggtagttgtgaaatttcggacatgctcttggcacagggcagaggttggggatctcttgcctgtgcggagaggacaaggggacaaggggacgtgcctgaggctggtgtgggtgttgatgtgacctctgctcttggggtccagtctccccaactctggctggcctggatgagtgtgccagaaatgggactctggccatcgcagtccactgggtgccctgtgtggtaggcacagtgtccaggggaatagctgtttgtctccaatgattgttctcttcttctcggctgagctgggggctcatgtgtctttaatactggccaactcctgcttaccccccgctccatctgagagagcaggccccaggctcctggcgtgtgcaggtggcagtttacgaacacactgtgacagcatctgaaatcctggtcaatactaaacacgactgatggccactgtgcttattttcagagtcatctgcaaagcaagtgatactggttttccatttacattggtgcaacagaatttccttttaaaatagacatttatttatttattgtatttacttttttgagacagggtctcactctgtcccccaggttggggtacagtggtgcagtcttggttcactgcaacctccacctcctgggttcaagtgatcctccagcctcagcctcccaagtagttgggactacaggcatgtgccaccatgccaagctaatttttgtatttttggtagagatggggtttcaccatgttgaccaggctggtctcgaactcctaacctcaagtgatccataggcctcggcctcccaaagggctaaaataaacatttaagtaaaaaaaaaaagaaaaaaatctgagtcattttaaagaaaagtatgaaacaaatggtagaccagatgagatggtcaaggtcacagagggagcctcagaatgcatgaagtttgggaaccctgggcaagggccctccttagcccctggcaaggtcactccggatggtgtgggtcttaccagcctctcctcatcctggccttgttttagtcgccagggcctgggtggcagattcttgagtctctgggatctttgccctcccctctgcttctccctctttctctccttgttcctccttctccttcttcactgatcaagctcaagaagcacccagcaggtccaccgcagacccctcccatcccatcttgctttgaggctttcctcatgggacagggttggcctgtcctgattgtggagtctccacttccccactcaaccccgcttgcatcttccttcatctgcccagtgcaccgaggctgcccatcagagtcacctgaggggctcttaggagatgccccggcctaaccgcctgccagttgagtcagaatccctggtggagggacatcctaacaactctctccttcaaggagcctggcctgacgggaggagtgtttccctgtccctgtcgcccaggggttcattttcgggcggatgaacaatggctgcagagcatagaagcccagctccacttccctgaaggacccaggttccttccacatttctgctcggtcaccctcagtgtggtgtctttcagttgcttcatggtcacgaagtggctgcggctgctcagaggctcctgacatcacagcagctgcaccagcaggacagcagggagagggcttgcatctcagtggctaaaactgggtcacatggctgccgccagctgcaaggaggctgaaaggcaagtctcgggcagagggcagtgggatgcctatgattaggccagtcctgattcatccctagggctaggcatgtggctggcccaacagaactgctattttggtagcaaaggaagaaataagaaacagcttttgagagtgcagccaagagtaagtgtgacaaggaaacataaatatcatgtgccggctgggcgcggtggctcgcgcctgtaatcccagcactttgggtcgaggagcgcgtggatcacttgaggtcaggaaatttagaccagcatggccaacacagtgaaaccccatctctactaaaatacaataattagccatgcgtgatggcaggtgcctgtaatcctagcttctcgggaggctgaggcaggaacccgggaggtggaggtttcagtgagtcgagatcatgccacagcactccagtctgggcaacagagcgagattccatctcaaaaaaaaaaaaacaaaatctatgtgcctcccactgacagatattcatttttttgttggcatcccctacactcagaatatacattctaggtgggaatttttgtctgttttgttctctgctgtatcttcaagatctacaaccgtgtctggcaccgtgtagatgcctaataagtatttgtggagtaaatggccaaccctacgacgtgggtacccctgttagccctgctttctagttgtgaaacaggcccagaaaggttcggcaacttgctggggacacagggacctctagctgatgcagcctagagttgagcccttggggagctggccccagagctggtgcactccgccctgcagagccctgcctctcctgctgggctgggagccgaagctggtggttctaggctcaaattcttgctctacggtgaccagctgtgtgacccagggcagtctccatctctctgggatttgctccttgtctgcacagagaaacaagcctttcctcttaagggtgcctgtgcattccaggaggcggtcataagcacagctcttaacagagtctggcacccagcagcttcctggctattgctggctattgttgctctcccatattatagggggggcaaccaagaagcaaccagaagatgttcaatgtcacagagcctgtgggttcaaaggcaggcctatgtgagtctcctgctggaggaagagctctcctggtgtggccagtacctgggcctgctcctgcgctcctccggcttccctagctgccctctgcccacctcccgcccccctgccctgctctcctaaccccccagcctcctgccctgccccacacccccccacctccctaaccccctgacccctctgtcctgccccccacccccgacccctgtgccctgcgcccccacacccccaccctcctaccccctgacccctctgccatgccccttcagcccccctgccctgccctcccaccccccctcctcctgcactgcccctcccaccccccatccccctgacccctctgccgtgccaccccactcccccaccctcccacccccgacccctctgccctgcacccccagctcggccctgcctttgtcctgcttaccccctagcagaaggtgttgcccaggcactggcaggaggtggggccaggccgcacactgggcactagttgctatttgccttcctctccatggccccgcctggtgtgggcagaggtggcatggggccaggcgggtggtggggagggcacctggctgtcctctcttctctccctgagctcctggtggtgctggccagcaactagtttgcccagaattgagggctttcctgggaagcctgactttcagttctaaaactgggaaggtcccgggcaaagctgggtgagttggtcaccatggcagcagaaaacctgagcgggatgggggtggggcagtagaagggacagcagggagtcagggccaggatcagccacccgggacaatgtgctgcccctccagcaccagacagaaccgagggaggatccctgtccccctcccacatcactgattctgggagccttagtttccattttggtaaactgatgctagagattccccgcctcacagggatgagggatggggaactgggtgaggaaatgagcatagagcacttagcagatgcagacatgtgattcatgggggatcacattattaggtctccggcttcaaacccagcttcccgctgctcagaataaaatgtgacaccccacagaccctggaagcacctgcgatctcagaccgaatctccccaactccactgctcactctgctccagccctgtgggcctcctggctgcctgagattgggccaggcctcgccctaccccagggcctttgcacacgctgtttcctctgcctggagcaccatgctcttccccctctcatctttgggcctcagcttcaaggtcactacacagagaggccttctttgtccctcttatttgaaggaatatctgtctccttggggaacagtcatctcttggccggttgagtggctgccctgggcctggtatggtgccccacccagatcaaagctcaggatgtggtcgtggagtggaagaataaatgaatattgacctgtggaggtcccaatgggctggagaaagagcccagtgtcttaaatctctttcctcctctgagcctcgatttcctcatctgtcagcaggcatgagaggagcatctgagtccttggtctctgtgaggcatgaatgaggggacagagatgaagtctgttcagtgcacttggccagcagcaggactcggggcctggcagctcccctgatggcaccctgggggcactcctccccactgtttcctccctgaggcctgaggaccccatgggcggtgggtgctgctccacgctccacacagaccaggaagccaagcttggggccacccccactgccttctcccgggcaccactgcccacggctggcctctcctcaggccacaggtctggcctggctgcccgaactctcagcctggaggcagctgaagcgtcacatgcccttggccagccgtctccgggggggcgggttcccctcgggagacttcagcacattgtcaaagctgtcaaacaatttccctgccaggtttttgcaggaatccaaggcctcgctcccaatgccaaacaccctcttaagacgatatctccggggcctgcaggcctgctcagcggcgctgcctctcctcggccttatatagtcaaaagccggggaatccctgtcccaccctgggctgggatctgatggaagctgccacagccttggcctgaccccgggatctcccgcctccaaatcggccatctctggccaaggggccgggtgagaggcctggcatgcgcacaggcctgcgcggggctctgggtgtcccatcagctggcagctggagcggccaggccagcacaggctcttaccaaataaggcctgggcagctgggcttggccaggctcagacggcggcagctgggccagcagtagcaggcctgcctgtctcctcctcccgcactgccctgcctgcccagcaaagactctgcagactgtggtcccctcgactcaagggagagctccaccctaagaagcctgggtagacggtcccggatcccctgccagacgcgctgccatgaggaacctctggcaaatttccattgggaaccttgagggaaggcaaggtggagaaacattcctaggactcccgctgctgcaacgggagccccgagccaggccaagaaatgacctgtccctcccccaggaccccgctcccactcctgcatcccccagggtgttccgatttggatgttgcttgtcccaccagtcagccccttcctggtgcctggtctttggggccaaagggcaaggctggccaagcggtttgggaagcgggcccgggctcaggagcacactgagggcccttgggcagtgacctgccctccaactgtggctatgatgaggaaggcgcatgcgtgctggttgaggagggaagacccccatgaccatgagccagtgtgggcagaggaatgggcagggggaggggcagggggcaggtcctcccttaggagccactacggggcatgaggctcctgtgtctgctcgccttggttccagccagcagctttggctcttggagcctcagttttgctatccttaaaatgggtgtgatacaaacgctatctcagggtggcagcgggagttcaaggggacaagatgcacacctctcagggccctgcagggagttcctggaagattgacagcagggcgagggagggatctctcctttcctcggagatgggggaggcaagggctctctttctgtccctgacaccccctcctcagctcctcctgccctccctgctgtctcattatcttaggtgtgatgggggcatggtgaggcctcccagccactcccagtgctggaagtgcaggcgtggggtgaccagctattgcacatgtgactgcatggctgtgtgtgtacgcatgtccctcccaacccctattagcacaaccatgggaacgtgaccgtgcagcccaacagccagggcgcgggatactcgagagggtggccccggcctggggatgtctgtggttctgctgctgctcatttctgaagccccttcatgagttctgggactcctggggggatggggcccacttatgagtccctcagaggcattcagtgcaaagtaaaaatgtggccccccctccaaacgttcaaaaacgacgaagacttttaagacgacaacagcagagcattaaaccaacaggcggcccttctgagtgtgagggtccctctgcgactgcacaggtcacaccccatgcagccggccctgtcccctctgcccctctgcagctcaggtgggcggggcctgaccactccagcctggtcactccagcctggccttagactctgaggtgagtggtgccaggacctgccggtcagcctggattcatcatagcctctgttgtccagtaggcttggcaagaagggtctgtggaagtttataaaagtgacaccccccagcccccaacctggggagcagccaggagccctatgtcagaatgtgcggcccctaatgaaagtgctcttccagccactctatttaagccaggtgagtttgttctcagggactggaggccggcaaggtaatgcagctgtttttagcgttttagcaggaggcaggtgctggccaggacgcctgtgacgctgtgggtgacgatggccatgacccggacacatacaggttgggcaacctgggcagagctggtgtgcctggaggtggggcggggggggtgcctggaagactggtgtggcctggatgtcctgagagcgccagaacctctccttggggctccctgggtggctaccacctttgactcttgccctaggggcacacactgccacctttccagaaagttctctgggatctacagaaactgaccacccatccaggtgcttgaacgtgtcaactggtaacttgcagctgttctgttggaacctctgagattccaagcagaattgctcagaaccttccggatgccccacatgacatccgctccctcagggatagacagggttcggctgctcatcggggtctcccagagcctggaacagcgctgtcctagaagccgtgaacaaccatcctgcaaagctggagaagcagggcatttccccgctgacacgctcaggaccaggagctggtgtgcgtcaaagtcagcaccaaggccggtccatggcctgtgaaatactcgtccctcaagattgcatttcaatggaaagactggcatttcccattcattcacctattttttgatggaggaaaaaggtctttctgagtggggtggggtgctctgctgcttggggtggtcccctcatcttccttgcataacccacatctccagtgtatcttgtgcctttgcagtttctctttctttgaaatggaagagagaaagaatatgctcccagagacggtaactggagagcttcggagcagacttttatactctaaagtaaacttgtccttttcattaattaactaacagagatttatttggtgtggacctcacgccacagcctgtgctggatgctgagaacagaggaaaaatgagcccagggaaattgtgcctgagtgcagctaggtcagttttctgttttacaaatgcaggaaccaaggctcagagagggtgtgtgaatcacctaaggccacacagcgcctgtgtgacaggctttggcctgtaaggggaaagccggctagaagagatgagaaaatggggtgtcattcaccagcaaaactgggttcaaatccgcctctgggaccttgggtaggaccggcctgccaaacacaaatgcatatctgattgttcccctaccccattttgtctgtgttatcttatgtaaaatgcagattcccccatccttcctttatcccttttgtttatgtgggtcccctcaagctttaagggctgtgctctgctataagctagccaacttcttggagcctcagtttctcatttgtcaatgggaacaattactgctggttcctgcggtcactcagcaaatatttgttaagcacctactaggtgccatgcagcattgtaggcactgggatatagctgtgagccaaacacccagcacagggctgatgtgggagctgatggggtggtgcagcgggcctggtctgggctccctcagcgagccaggcccagggcgccccagggcaacagggctgcactgcaggtagactcagcttggcagatccctggccctgggggccgtcacatgggggccaggccaggggcgtgtgggagcggaaagaggatggagggcaggaaggagggagaaagagggagaagagaggagggcactctcctcatccccatccttctccaaagaagaaatgacggcatcgtgctctcaccgactcatcgtcctagtaggtccttaggacacccagcaagccagacctccgtgtgacagatgaggaaactgaggctcaagggtgacgtcacttgcctaggatcacagaattcccgagggggatctaggcagtctccctccacagcccagtctcttcccttcggacgcaataaaaaaagagggaaggggagagaatgatggaaggggggaggagggaggggcagcaggaggtgtgggaagcaggagggggaagaggcccctgggaggctttctgggccctgccttattttcccctccctcctcctcctcctcctcttcctcctcctcctcctcctccttctcctcctcctccttctttgagacagagtctcgctctgttgcccaggctggagtgcagtggcacgatctcggctcactgcaacctctgcctcccgggttcaagcaattctcctgcctcagcctcctgagtagctgggactactcagctcattttcgtagtttcagtagagatggggtttcaccatgtcgaccaggctggtctcgaactccatccccgcttctccgggggcttttgctcctagggactcgggctcagctgagctcctgtggcaagtcctgtgggactggcatggaagactcctgggcatgtggtggctatgactcttccctgatgatggtggccgcaccttgggattggcttctcctctccgagtcagggacctggcatttttggcagcccttgggggctatttttaaacctcacagctggttttcatcatggctgctgataggtacgtgtagaaacattggctcttgccagcattctgaacaaaccttgaaaacgagcagggttggagcggatcaaagtaggggctcagggaaacctgaagtggcagccagtgctttgtccccacccagacccttgtaagggtaggagatgaaagagcacggctcaggggatgaaaggaggtgccagggcaggagagagccagggattaggcacgttccctagaagatgtagctgaatgttgggacacaagagaagggctctttagcagctagagccctgttatcctcattttccttctgggaggcagcaaaatacagaggttgagagcatggattctggagtcccacaaacccgactcctgccttgagtcctgactcagcctttaacagttgtgtgactgtgagtgtatcagttagctactgctatgtaacaaatcgtcccaaaacctagttgcttaaaacatgattctatgagttgacaatttagcctgaaccatcagttggatggttctggtgtgggctggcatccctcatgcatttttgcagtcagctgccaggtctgcaggaagctctgactatcatctagggtgatgggaacaactggtctctcattctccagcagaccgttctcctgatggagacaggggtctgagagagagagagaagaaacctgcaaggcagtttggggtcttagatttggcacggtatcacttccagcaattctgttggccaaagcaagtcacaagaccaacctgactcaagagtttggaaaccacctctgccttttgatgggaagagctgcaaaaccattttgcaaagggcgtggatacaaggaaggatgaatttaggtcattttatacaaatctgtgtaccacactgggtacctatatacctctctgagcctcagtttcctcatttgtaacatgtgaatggtttggcttgtcaatcggagaaaacgatgagacaagtctcaatcatttttggagatttatttgccaaagttaaggacgcacctgggagacaggtctatgtctttctctgaagatgattttgggggctccaaatttaaaggagaaagggtgggatattgagaaacacacagttttcacataaacaaaagggataaaggaaagatgggggaatctgcattttacataagataacacagacaaaatggggtaggggaacaatcagatatgcacatgggtctggcaggcaggggtgactgcacctaaataaaagctataaattgttgtgagaactaaataaggtgaggtatgtaaagtcgccagcatagtgcctcatgcagagtaagtgttgattccttgagaggaggcttacttcttgtcaccccctaccccactatccctgtgaaacacgacctaggaggtcagctgctctctggagaaatgctgtctaaaaaggcaatctgtagttgcaagaaacccaccaggactgggagccttttggtaaatatttctttcaccctctgcttcagtgatagaaacagtaagtcccagttaagcaggatcaaagtttatcaggcatcaggacacactgactgctgtctttctgtccttcaggccattcaggtgtcttcgctctttcattcaacaacatcaagcacctactgtgtgccaggtgccgtattaagtgtagaggacagagtggtactaaaagacaacacagtccttgctgccaaggagccaacagttataatgacagcaacacacaccagttcaggtctatgtccctgtaataaggtaagaacttcaggtcacaatccagataataaatatggcattggtttattgttcttactatcaacagaattgtgattggatccttatcccactaggctgggtggggagcttaatctcaggctgtctcatattctagttgctaataataacatccaagcctccttaatagctcacttatattgaggggttactaaatgctggccccagggcaggtctttctttctttttttttgagacagggtcttgctcattgaccaggctggagtgcagtggcaagatcacctctcactgcagcctggacctcctaggctcaagccatcctcccacctcagcctcccaagtagctgggactacaggcatgcaccaccacacccagctaattttttttttgagatggggtttcaccttattatccaggctggttttgaattcctaggctcaagccttctgcccacctctgcctcccgaagtgttgggattactggtgtgagcaactgcgcccggctgtaggtcaggtctttacaagcatttcatcctcttgcagcaatctgatgaaagcatttagggagcccaggaagggaggcaatggcgatctggaaggatgagctgcttgtcctaggatatacagctatgaagtttttaaccgaggtctggttggattagggaggggacctctgccatggggcagtcatgacaggtgcggggcgccatcgtctcctccaagggtgaggcgtctccttgaggtggggtttaccccatggtttctgttcttgggtggcagggccctgaactcccgggtgggtgtttcaccctgggaggtggcaggggtagggacagggtgtctaaatctcagcagaaacatcagacgtggccaccaagaatcagctagatcatccagagcagcaggcacagctttaagtgcacacgtccacaggcctggatgttgttttaacatttaatttggtccagcatcagccagctaaacctgctccttatcctcggcctggctggcagctgcccttcagggagctaaaccgactcctgcgagtgagcggccaggccttttcgggagccttccaggtgtaactctggggagggtccacatacctcagtcactcacccacttttcacacccatgcacacttacctgtgtacattcacagacacactcacacactacttttgtttttttttagagatgggatctcatctcactatgttgccaggctggtctcgaacatctggcctctagtgatcctcccaccttggcctcccaaagtcctaggatttcaggcgtaagccactatgcccagccacacttctacatgcatgctgcttcttgcaatctcacacactcacacacacatgcacatgccactccagcacacccacacatgcacacacacacacacccctctcctgagccaccctgggccgcaactcacctggcttgaattttgctttcctcagttgaccctggccctgcagattgagaggctgcacagagttgaggccggagacaagagacttatttttcacctggctcagccaccaggtctcttgctgtctctgggccttattcccctaacaaaaacaacagtccacatttattgaggatgctgcggatacagtcttatctaagactcacagcaggctcgcgggaaatggaggctcgggtagggaaaacagcctgtccaaggtcactcaagcagtaaccagaagacctagggtttgaaccctgactgtggaactctagctactttgctgtacgatttcccagcccacttcattctcccaatgagggcatgctgttataatcccatttcacaggcaaggaagctgaggctggtagcgtgcaatagtgcctcgcactggacttctctccctcccttgctcacagtgggtttcttcctgcccagggccctggcccgcttttttctctctgcctccctactttgccaagttcatttctcttcttcctcttggtcttaccccaaatgccatttcttcaggaaggcttctcttacccccaaactagaccatactctcgcttgaggctttgactgtgtgttttctgtttgctagtatcacacgtgacccccagtgccatggcctgaagtacctcttgattagttcacctgctccttaagtcaggcgtctgggtgggctccactgaccctctgtccagggtctcagtgagcccaagtcaaggtgtcagcagactgtgcccctttctggaagctcaaaggagcacctgtttcccgctcattggggtggttggcaggattcaggtcctcggttcctccctttccaaggcagcagcctcggggtgagtcttccctctgccgcccctcttcccattccctcttgcactttgaagggttcctgtgaggacactgggccctctccaatggtccaggatgatctccccatctccaggccagctgattcacaacctctgttccatctgctgcccaaattccccttcgccgagcagcctagagtagttacaggttctaagactggggtgagggcattattctgcccaccacacttcccttgctctttcctgccgcctgtttttactaaatgtgtcattatatatttgtgtgcgggattatttgttttctctctgtctccctcccataaatatcatctgcatgactcaggttgggtacatagtgcccgtacacaggaggcaccgagtacaaattccctgaacaggtggcagcactggggtctgaacctgcacctccatgtcattcttcaccaacaaagtagtttggatgctcactttctcccctgccccccatcaggtcggctgtgtccagttgcacaggctgtaaactgcacaactccagggcactattcacagcttagtctctgtgatcctcgcagttgggtgggatccctcaggacctgtaggctgaagctctgctcctgaacctgagcctgtgttctaaatctggagcctgtgtttataacattggctgctcctagaatcatccagagggctttaaaaaaccctcctgcccaggtcatgctgcagaccaactgtgccagaatccctagggtggcactcgacaccccaagtgactcggaagtgcagctgaggtgcaagcctccctccagcagggatgcagagataattatgtaatagaggaagagcccccccgctccccaccccgcacccccgtatactttgcataaccgaggctgggcagcttcctctcccacaagcctgtttcttcactctgtgtggctgcagcctggctctctggcttcctgtggccgataagccgtcctgcatcatttacgacgctgggccaacatctggctgccagtgtggtcaccagtcctgctccagtgagggggggcagtcatctctcccggtgacaaactgcctgcccagagtggcctgaggagagggagagcaaaaccacatcatcgagccccttgctcgggactcactggagggttgctggatcctaagttttacttggctttgggaaatttgctggcacattagttgcgaatattttgctctgagggtctgagtgcagtcttcgaggtctcagcatcttgcttctagggcaggtgatgaagtgcactggaggctggggcatggccgggtgagctgaggtgctgggagcagcagggaccatctggggcaaactgctgccaacacactgggtttctagggtggacccggcctgagaaaggacggagggggtggcttggaggggcccggagagcgtgcaggccacagatggcactgtgtctgcacacttcaccttctgtgagaaatactcatgaccctcttgctctgtcgagccccggccgggaggtgtgtggttgcagccgcttggtcacgtcccctcatgtggaaggtacagtccctatgggcacacaagcccagggctgggcccagcacccgcagctagccagccccggagccccccgaaggagtcccccaggccagcactcctcacctctgggcatccacctccccctttcccagagggctgtgtatctttggcctcctgtctgggggcctcggcattccttttctttctctttcctcctcagtgaagctggcagtggggtggagacaattcaggtctgactgcctcagcagcaaagaaggggggatggcagctcatcccaggcagaccccgaaggtgaaacatccgcatggcacaccagtgcacttgtggctattgcagccccatagtcaaaactccgggatgtcaccatgctgagggctctgtcacatcccctgctctggcttggccaagctccagatggggacaatcacatgcctcgccttgccccaagaaagagaaggagataatggaagaccacccttctccatggtgccacgtggtgatgcttgctcttgcttactgagcactcacgggggaccattctcagcctggctgcgtatgagtgtattcagttctcacaacagccctgcagccacgtaaatcctctttgtacccatcttgtagataagaacaccaaggcacagagaggtcaggtaaccagcccgggcccgcacagcccatggggacagtgctggtgttgggatgcaggcctgacctccccaggcaccccgagtcctgctgccccttagaaggaggcccaggagccttgtctttgcggggctatgagaggggatgctgctgttcccactgcagaggtcacaggggagcgcttccgctgctcaagaggaaccggaactttggaaaccacattcttatctgcccctcacaagagcggcaacttggcaacactcatgagcaattagggttggatgagtcttcaggatgggtcttcatctgcttactcgttcactcaatcattcattcacctactctttcatttgttcagccagtgtttattgaagccttctcaggccagttgctgggccatctgcacagccatgccgggaataaacccacaagcacgtgctgtctatgctatgtcaggtggaaggacgccagagacagttaaaccgggtaaagggcaggaggaggatgggacaggagcctgccttaggcagggtggtcagagaaggcctctggggaggtgacatttgagcagacatctgaatggagagaatgagccaggccctgggcgcaggatgtgccaaacagagggaacaaccagtgcaaaggccttgaggcaggggcggcagcagggtggccagtgtggctgcagggcagtgaacaagaaggagtgtggcgggatgaggttggaggggctgtcgtggggagggatggtcgggccgggatgggcctgtgccgcactgttgagggctttggacttgactgagtgagacgggggacaacggggcccatgagattgttctgccttgtgttttaaagactagagtggtagagtggggccgggcatggtggtgtgtgcctgtaatcccagttacttgagaggctgaggcaggagaatcgcttgaactcaggaggcggaggttgcagtgagcagagatcatgccattgcactctagcctgggcaaaaggagtgaaactctgtcttaataaataaataaagactagggtgtaagggcagaaagagggaggaggtgaggaggagagaggtgtcagtggcttcacatgacgagggcgggaggctgtgagaagtgaccaggtgcagggtgatgtgatggtacaacctcagggcttgattctgactttgacaaaggaatgcctgtggaaggcaggacacctggtggagttaaaatgactgtccagcctgggcaacatagtgagacccaatctctacaaaaaaacttaaagtagctgggtgcagtgggtcatgcctataatcccagcactttgggaggctgaagtgggagaattgcttgagcccaggagtttgagcgaagcctgggcaacatagtgagaccccgtttctacaaaaaaagaaaaaattaggcaggcgtggtagtctgcacctatagtcccagctactcgggaggctgaggtgggaggatcacttgagtccagaaggtcaaggccgtagtgagccgtgatggcgccattgcactccagcctgggccacagagcaagactgtatcttaaaaaaaaaaaaaaaaaaaaaaaaaaaagttggttgcagtggctcacgcctgtaatcccaacactttgggaggcctaggcgggcggatcacttgaggtcaggagttcgagaccagcctggccaacacggtgaaaccccatctctactaaaaatgcaaaaattagccaggcatggtggcgcatgcctatagtcccagctactcgggaggctgaggcaggaaaatcgcttgaacccaggaaacagaggttgcagtgagccgagatctcaccactgcattccagcctgggcaacagagcgagactctgtcttaaaaaaaaagtgtgcttttgggtgggtggctgattatcaggtaagagttggtgatatgtgatgacgtggggtcatcagactggcagagaggttggagaaccagaaactccagagggctaggaggtgaatgagtgtgactagacatgcacctgggcagccgagtctccagcctctaagctcctgtcctgccctcttccaggccagcagatgcccaagtctctcccgtccccaccacctccagccctttgttgctttcacttgagcccaggaggtggaggctgcagtgagccatgatcatgccaccgccctccaggctgggcgacagagtgagatcccttcaagaaagaagacagaaagaaaaaaagatagaagggaaggaatggagggagggaggaaggcaggcaggcaggctgcaaagatttcagcctgagcagtgaggggcacggagggtgcacctgtggagatgggagatgggggaagagcaggtatgagggagaaaattctgagtcctgctttcgacgttgcatttgtctgcaagactgcttagctaattcctgaaaattgggtggcttaaagcagcagaaatttaaatcccaaatcaaggtgtgggcagggctgtttccgtccggaggctctgagggagaatccgttccagcctctcttccagcttctgtgggcaccagagatccttggagctccttggcctgcggtggcatcgctctaatccctgccaccgtcttcacacagccttctccttgtgtctcggagtctcttctttctcctataaggataccagtcattggatttagtgcataacctaatcctatatgacctcatctgaactaattccatctgcaaagcccctatttccagataaggtcacattctgaggttctggatgaacatgaattctgggggacaccgttgcaggcggtgcagatgcgttaagattaatatgtgatgataggcccgcctggcgctgctgagaaggtggtgggccctgagctggaggtcagcaggtggtccaggctggaaatcaaaattgggagtcattgtcttagccatggcgtgtctgccactgtcctggatgtgacaccgaggagggagggtgaacagagaataggcgagaggtcagagtccggggcctccccaggcacctgttagaagaacctggggattctgcaggaggctgggacccaccctgagaggtccagattaaagagatgaggtggtaagagctcctcagggcatacgggggtgcaacttgcataagcacccctgattaaagctggttcgtgcgtgggacccagtgacgctctgatggctgttacatagaagtagttcagtgcctcctgaaaggacaggtgtgagtggcacttgccattgattctgatgagcctcctcctcctcagagcacggtcttgcagggctgtgcttgcctcctggatctcctcactgttggagggcccttggagtccctgggggccagagagattgtgtgtgcatgcaatgggcagggcagcaatttgacattcaaatttgttttctcagctcaccagggctgctgggccccggcttgaatgggctttagaaatcagatgacaaggagaagtgttctttgaacttccattaccctccagcctggccctatgctgctacctcccaccaatcccccacgacaccttggccacacacaggctttcttgggttgtctcaaacatgttgagctcctctcaaccttggtggcctttgaatgcattctttccttcttctgggaatcctgttttcttccccccattcctctctggctgacttggattcaccattcagttctcagcttcgttgtcactttctccaagaaggcttccgtgattgctcttccccctgaccctgaagcttgggcttgtccactgttataagttctcatagttccaatgctttcccatcattgcacacatcagaatctatttaaataattatttctgcagttatttgtcaattgtatgtctctgttgctaggatacagggaccttgcctgtcttgcctgccatgtcgcccccagcacctatgacagggtgtggctcccaatagctggtcactaacatccgctggtggagggataggtctggttggaggggaaggtttggttcagtgcccgggggtcaggggatattcctgatggtggcacagctatttgagagaggccgcagcatctgataaagaaaataaaccagccagttgggccactggacgcctcagtcactgccaccacgtccacagccattgcagaaggggcagctcactcagggtggccatgtgtggggagacttaatcccgcccctatggtgcagatattgaaccgtgggtgcgcatctgacctagggggagccgatcattggcgccaacagatgacctgagccagtccaaactctcttagggatttaagaaaccctgagaatataatgcagatgacgagatgacagcagggtgtgacgctgatggtttctggggcagaggcaagccaggcaggccacgtcggccacctccttggcgctccccaggtatgccgggcacatttcagccccggggcctttgcacggcctggaaggctcttccccaggcggctgcatgtctcgcaccctcacctcctaggtctttgttctcatgttctcttttcaatgaggtgtacgctgaccacctctctcaccacttataaacctaattctcccccataaacacttgacttctccccatcatttacatccccatctgacatacttgactcctttttgttttgttttgttttgtttttttgtagagatgggagggtctcgctatgttgcccaggctggtcctgaactcctggtctcgggtgatcctcctgccttggtctcccaaagtgctgagattactggtgggagccactgcgcccagccctttcttgctcttggttgactttctttcctcactagaatataggaaacatggctctaagaggggccgtgagcatggtctgtggagtctgggagacctaggttcaaatcccagtctcaccactttttacctgtgtgacctgggtgtgggactctctctcggggcccccgtttccatctcaaccagggtcacagtgggaggctgtcattgaggctaaggtcaaggcaggtgaaggtgctttgtcaactgggaagaatggatgggtttgcaaagttcgccctttgttctagaaaggaaaaaacgtgtgaagcttccagatgggaactttctgtccctgcatgttccatgcagaggctccatggggatgaagttcaatatttcttgtggaaagtcacttctcatctctcgctgtgattctttcagaactgaggcttcctgggtgccttgcactgcagccagccacgttccagggagcggcagctcctcgaaccagaagttctgagattgaatcctgggactgtaacctggtaactgcactagacaaatctggttcaacttttatgtaacaaagttgtgagttgttttcagttgccatgaacccccaggttgaaggtcacataacctgggcatgcccagacacaccaagcatgcagccagggacggaacctaagtgctcgagccaggatgcggggactgaattaagaagtggacactgcatggcaggatccaggatccaatcagattgagccctggcgtcaccccatggcaggatctaatcagatcacacctcctggcatcacctgatgggaacagccaatcagatcacacctcattatcctatgcttataaaacctgacctagcccccagccgggagacagatttgagtgtttcctcctgtctccttgccactcacagtaaacctttctcgctgcaaaaacgcagtgccttggtgtttggctttctgctgcatgtgggcaatagacccagttcggttcagtgactgacctagttggcagtgagctcagcacatgacgcagtggctcaggactccactcagcaagttccctgggactgcatccctttattgtcccattttccagggaggaaaccaaggctcaccatggcgaaggggatgcccgtggtcacagcgagtgagtggaggagcgagatctctaacccaggcgtgtggcatactcgaccctgagcaccaaaacatgcttgctagaaccatgacaacaacgtcaacaacgacaaataacagtgactgggtgtttgccgtgtgccaggcattgttctaagtgctccgtgggaactacgctgaccaccccatgaaggaagtgctctttcagatcccattttgcaaatgaggaaaccgaggctagcaagcagtcagactggaatgggagcccaggaggcctgcctgcaggagccgagagctcaccactgcaccatgcatttcattcattatcctatgcttagtgtttagtgtttatcctacgtttagatgtttagtggaccgttctgtcctctgaccccagccgacaagctctcctaggttctggtggtgagagttacattggtttctatgatgtgtaacaaattatcacaaacttagtggcttcaacaacactcattcattatctgttttaatgggtcatgagtctggcacgttctagctgggtccactgcccagggcctgacaaggctgcagtcaaggtggtggctgggctgcattctcatttggaggctcaactggggaaaatccactttcaagctccctctggttgatggcaggattcatttccctgcagccataggactgaggtccctgttgtctgtccagctgttggctgggactgctgtcggtttctagaggctactcacaggtccttatcacgtgatccctcctggggccctttcacacgtccaatctctgacttcaagaaaggctcagttccttttaagagctcatctgcttaagccaggcccacccagaaccatctcccttttgaggaactgcaagtcaactaagtagtaattttctcatggcatgatacgccaccatatctacagtcctgcccacatttcagggaagggggttatacagggagtctacagcaggggctgggattctgggccatcttagaattctgcctcccacaaggggatgggggcctttctgtgctgtgaaggaagacaaggcttctctctggaaggattcccagccacagtgcctcagaaagaaaagttagcaagaggcatgggcccctttccaaagccttccctcagccagctttgggaatttctccaagtcttgggcactgtgtttggtaatccagtgtggattcagctcctgtgtggctgtaacctttgcaagagagggagatagcacactgctaagggctctttctgtcttgagtgacacaaaaccagactcaacgggtttaagaaaaacgatttgtgtgtaactgacatggtctgggcgcttcctgccttcaggcacagatggatccaggggctcaaatgctgtcatcaggacttgatttttctccatctcttactctcccacctttttcagtcagcccctggcagcccagggcttacttcctcccacctccccttccaatagaaagtcaaattctttcttcccaatagtggcgcagaattaactcctgttggactgatgtgagtcctgttcccatccctaagccaatcactgagtcctgcgggatgaaataatctgattggccaggactgagtcacatgtctaccttgggctttgagagtggggttttacctccccagactacaggaattcaagctgtggtggtggggggggggccctctcagaaaatcctgagtgctgtttccagaaaatgtggcaatgcatactgggggtgggggtggcagaaacaacagttgtcttccccatctggcgagaaagtggagtggtgtaagcaccgccccatcccacaccatccaggggccagaagcgactgaggggactatgaagccagtggggctgcgggtggagggttgggggtcggggagaggggagggggaactagtagccgctccctgagatgggtgaatagagggaggggcagcagaaatgcaacggtctcaggggaagaaggagacttcccaagactgggaagggaaggggagaggaggtgaggggggtctatgcctggggagaccgtttccctagggcactgtcgcccagcagcactggcctcccccagtctcagggactccaggtgctgccaagttctccagcctcagctcagccagaggctgcagatccaccctgtctaggggtcagcagcctctgacaatgagcacttaaaggtagacagtgtgaactgaagaccagccagctcctggaatgttcgttccacctggggcaagaccctgagtctttacattacctggaggcagtggggcaggactggctgtgtgatttgtaaggcccagggcagaatgaaaacggggagcctctggttcagaacaatggaggacttccaggccggggcagcagagcctcacagcaaggcggcactctgagctcagggcctgtggggctgcccggcacttccctgtgggaaatcaagtttcatttgacttagaaaaacagttaagtgatgcctcctgccctcactggggtgtcctttttaccccgggcacttctcctgggctcctgcgctcctggcgctgaggtaagaggagacacacgcaaccttgctggcctggccaggaggagcccacagccgtcatttcagacagaggaacctgagccggacgtgaacctgggttcagacactgccgttgctgtgggtgagcggctgttctgcctgtggagcagcatcgggtgggtggttgcctggcaccgtgactgttaggagaacttctgcatggccggggtgtactttatggggggtgcggccccctgtaatcgctctgcagtctgggcaccctgtgatgggggcctggtcctcatctgcggctgcctcggctggctccgatgtgaggtgaggagttaacccctgccctaggctcccttgctcctcttgccacccgcctccccaccactagcccctgactgcctccctgctgtcaccagggtccctttgctttgtgctggggggacctgccacctccccctcccctatgtgccccatctgaaggcgtcccgtgggtccccaggtgtaatcgtgcaggagccttccccagcgcacatccctgagtctgcgggccagggcctgtcctcctggccgccattggccagaggcgtcccagggctgtcctgggaatgtctctggaacagcaggtccttccagtgctgggttccatcctgcagcgtggttaatgggcatgtagaaggcacaatgtgcccagctgctgcccaggacagagtggacatggcctgcctgggagctgattctcttctgggaatgcgggatgcagagaagtaccatggggaacggcggacagcatgctggccgcaggccactgactagcttatctcctgtagctgcctggtgacaatttgacttttcccacagttcctcccactgcccttcttgacaatggggtgggtcactctgacctcttgattgacttgcactttgaccaaaggggaactccgggggaggctggaggagccaggcctgggatgaaggcatctgttgaaagccgtctctgggttgcattgtctgaaagccaagagatgcctgaacgaaggtggctttgtgggcatgtgacttgggtggtcatatagacacctgcactctggaaggaccccacgtgccaaaggaccccacactccaaaggacctcatgattggtttaatgccttactggtcactgttggtttaaggactcctttgaacagggccctttcgttttcatcttgcactgggccctacaaattacacagccggtcctggccctgaggtgcccccgccatgggtttcttaccaacaatttgggaatgtctgttttctcctgagtgatgtcccttgtcatggcctgctgtgggcagttcattcattctggttcagagtcggtcctgaacccaggctgcagagcccggaacctcctagtccacaaagggcagaggttcctcctgaagaggcagggagaggacagggtgtgctgtgtccacatcctcctcccctccctagacagcacaagtccccaaagtgcttgggatgcgagggtggccatccacagggacccctcggtggggaccacacgtggttagtgccaggatctggcctggaccttggcatacatcccctcctggcctccctggggacgggagggactgactgtgccagggttcccagggctgggttctaagggagctttttaaaaccacttcctggtccggaaagaggaggacaccaattaagtgcctggctgaggcctgagacccaaatggccttgagtccagtctttcacttaaagtccaagtttccaagaacctgtcaaagatggtaagtgaggactgactgaacatgacttttgtgatagaagagagggcgaggaagagagggagagagagagaaagggtttgtaccgcgtggaaggggatgagtcctagcccgaatcctagctctgctgcggctgtggctcagggccttggctttcgtctcttgaaagtggggctactgacagttcctgcccgagggggtagtgtgaggaggcacggggcctgcgcccgtggaagctcagaccctgtggtttctctgttacttgaaatatagccaagttgggatctttccagagacccctcaattcgggacttcctccaaaggacacatcttccgacactggaagaagctttcaaaagagctccccaaaggtgaggaaaaaacacacaccatattttagttacagagatgtgggatttggggaagaaaggctggaaaggaagtttccatttttttcctctgtgcttctgtacctctgagtgccctgcggctccttgagcagttcaaggggcggccttgaactttgaagaggaggcaaaagtcagtaaagagaatcctcgtctatgcctcacttggcttaaatttcccataatgttatcatcctactcgatgaccagggtacatttgtccaggctaagaaatcaacattgctacattacgattcactaaattccagactttatctggagttgaccagtttctccctaatgtcctcttcctgttccaggatcccatccagggtgccgcatcccattcagtcgtcatgtctcctaggctgctctggtctgtgacagtttcttactgttccttgcttttgatgaacttgaccgctttggggagtacaactccaatgttttgcgaaatgccctccgatctgagtatgtctgatgttttcatcatggttagaccaggatgatgggtttctgtcacgtcgtatcagtagagggtacatgatacccacatggccttgtttttacttttaagaaattctggaaatgtcaacaatactgcatatttcttatgggatgtgtatctgtatctcagccatcgtatgtggtaagatgttaacattgcactctcctgcaatctgtctcactcaatctcagagtcgtggaggtccccacaccaaagggacccctgtggttaactctgagggagggtggtggggactagttatggtcccctggaacctgtgaatgtgaccgtatttgggaaaagtgtctttgcaaatatagtttaggatctcaagatgaaatccccctggattcgtgcaggccccaagtccaatgacaagtgtccttaggagagaagagaagaggagacacacacaggagcagtctatgtgaagtcgcaggcagagattggagcaatggggtcgcaagcctgggacagctagagtccccagaagctggaagagcccaggaaggatcctcccctatagcctctggagggagtgtgactctgtctacaccttcattgtggacttctggcctccagaactgtgagagaataagtttcaagcaacgcactttttagtgacttgttacagtagacatgggaagctaatacaggcaccataaattgctattattattcttattccacttgtccttcaaccgaagtgcacatccccatctcagctgagtgtagcacagctgggctgtgtgcaaattccccgtgaccaatgacagtgcaatgttaacatcttcctacactcaggggcctctggctctgccggctgccttcctgcaggccctgtccctggcgggtgtagcgcccccatcgctacctcccttgctacatgatctttgaggaaacttttctgacatcctgcaatctgccttgaccaatttcctggatgaaattagacctcgtcacaaacattgaaccatgcagctgcctgagttcctggaggctgtgcctcccccactgggtgtttagaaaaccgtcaggctcggccgggcacggtggctcatgtttgtaatcccagcactttgggaggccgaggtgggtggattacgaggtcaggaattcaagaccagcctggccaacatagtgaaaccccatctctgctaaaaatacaaaaaattagctgggcgtggtggtgggtgcaggtaatcccagctactcgggaggctgaggcaggagaatagcttgaatccgggaggcggaggttgcagtgagtggatatcatgccacccactgcagcctgggcgaaggagcgagactccgtcccaaaaaaataaaaaaaaagaaagctgtcaggctgaagcgggggaggctggcggaatgctctggtgtgtgtcctgggaactaagtcccggggacttcctaggcacagcctccagttcacacaggcaggagaaaccagagggtacaaaagaatgtttcgtgtcttttggggtgaatttggctaaaagtgagtcctcaggggagatgctagtggggaagagaccagggttaagaacttatctgagggcaacagagctgccgcaaagctcgctccactgagtactagccactgaccttgagcaagctactgaccttgagcgagtcactgaccttgagtgagccactgaccttgagcgagccactgaccttgagcgagccattgaccttgagcgtgtcactgaccttgggcgagccattgacctcgagcgagccactgaccttgagtgagctattgaccttgagtgagccattgaccttgagcacgtcactgaccttgagcgagcaagccacctgcctctccaagcctccctgtgttcatctgcagaaggggataataatggtactggtagcacagggttgttgggaagtgcaagagggatgatgctgacattctatggagcactgtgtgttggtgccgtcccagcacccactggaattgtgcaatacatcacgctggacatgaagggaaggcagcctagcatgcaccacctctggctgacttgctgtactacagaggcacctcctgggactaccactggggtagtttagggtgaaatcacccagaccaggcactagctctcctggaggaatccaccgctttccaatccagagagcgacttggcatagcccgactccttcctgctgccctccagaccatgcgcaggtcctttgggttctaaatactaggcatcggaggctgaagtttcccgggttgaccaaccctggctccttatctctcctatgcccatggccaaatcctctgctctatattttcagttggtttcttgtgcccaggcctcctggtctggatctccttccttcctggcccagactctccaaagctcacattctcatctccaaaatggtgcagggttgccatgaggattgtgttccggaagtccttctttgcttgcttggggtgtggatgtaggaagggtcctactggcatgagtgagtggtccactactgctacccaggccaggcaaggacttccctgccccaccaggtcacggtgagaatgggtgtcagccgctcattggcaaatgcgtgggatctccatactggacagggctggggagctctccagctgcctcgctgaacaccattgcctgggtcccgcctgcctcagtaatccctttgcctaagcctttcgctctgaaacactttgcctgaacatcttcctggatttcccagcccaccctgatcctctcattcctcaaacccatttcaggattcaccttcaatgaccagcccagcgcctggcagattttccctgcatctttgtggcttccatggcattgatttgaacttggctttgcttcccaggtgacataacgagtatttttaagacccccaagaagcttctgtgtacattatttaatcctcacaatatccctgccaggtggtggtgtgagtgttactggccccatttcacagggggaaactgaggtccccagaacttaggctaccgcccaaagccatgcagccagtagggggcagaagtggggttttgaccccgtgcagtggctattcagggcctgggtttctttctggagtcctttctggagcctttctagagcccttcaagcagagcaggggctatttaaggtgagtgaggcccttccctcaggcacagaaagctgatcatcaagataaataccattttcatgccaaatgaatgcaaaaaatccatgatgtacaaaatatcgaaatgttaaagtcaggatgcaaccctgcccttgccccacccgcctgccttacttgccctccctacatccagccctggctccagtaaaaaaatatttacaaaaacagatgaccagcctgcgggccgtcgttgaacgatttgaattttcatataaaggtttgaggtgtgtgctctttccccaccacctgcaccccacgtttttattatgaaaactttcaagcatgcaaaaaaagaggagagaagagttggataaacacctgtctcctctgtcctttttatcccccaccctggatcctaagcacctgaaggcacgacatagtaccttagactcatactgctccaagcaggggcttggagtgtagcggtatgaatactttgtaccaaggtggcatttctggtccaccctgaccctctgggtcagaatctgcatttctaagattccctggcattctccggcacagtcaggtttgagaagtgttggcatggtgcatgctttgccaggagacgggacctgggtccacatcctagtcccggcacgttttgagtgttcagtttggcagtgattgttaggtgctggaccacctgctaagtgtttcccatacaaaactcatttaatcctaaataacaactcagtggctctcaacctgtggttctgctctccaggggacacttggcaatgtctggagacatttttggttgtcagtctgggggcggggctggatgcagtggctgacgcccgtaatcacaacattttgggaggctaaggtgggaggattagttgagcccaggagtttgagaccagcctgggcaatacaatgagaacctgtcactacagaaaagtaaaataaaaattagccgggtgtggtggtgtgcccctgtggtcctagctactcaggaggctaaggcaggaggatcccttgagcccaggagatggaggctgcagtgagctatgattgtgccactgcactccagcttgggtgacagagaaagaccctgtctgaagaaaaagggaataagcccagggtgggggtgttgttggcatctagtgggtagaggccaggaatgctgccaaatcccccacaaagcatgggacagctccaccccatagcaaagaatgatccagcacaaatgtgagtagggccgaggctggaacactgtgcaactgcctagtgagctggtcactgttatgatctctgctttgcagagatggaaacggaggcttaaagaggggagggttccacagccaccacccaaacggtaggtggaggggccgtgacagacccctcggagggtggctgtaagaatcaaataggtcctttgatcaattttttatgaagcagctactctgtgttaagtcctgggatcatgtagttcagtgctggcacacagtaggcattcaataaatgctgctgcttatcacaacagagctgcataacattcattgagcactcaggaaggacatcgtggccattgtccatgaggctccagtgacactgttccagctctgttgtgtggtgttcccatttggcttccagcaaacacaggatgtccctgtgggcagctcgctggtgcttccctgctctttggcaccacattccagctctctgtgcagagccaggctgcccagcatgcttctggagcccttggattcacttcccgggctgtatcccagcccagcccatctgctgtcccaccagggatgtgcatctccacagggtatctacagtgctgtttgtaaacctcaggaagccggattcctgggatagggcccacattcccggggcagcggctcctagaaacactggcagcctggcaatattccgacatacttatactaaaaaattattcactgcttatctgaaattcaagttgaactgggcattgtgtattttatcttagccctaattcctggaccaccctcttctatctccctttccctgctttagtattttataaacacttttttttttagacggagtctcgctctgtcacccaggctggagtgcagtggcgcgatctcagctcactgcaagctccgcctcccgggttcacgccattctcctgcctcagcctcccaagtagctgggactataggcgcccgctaccacacccggctaattttttatatttttagtagagacggggtttcaccatgttggccaggatggtctcgatctcttgacctcgtgatccgcccgcctcggcctcccaaaatgtataaacactttttattgtgaaatatacatacagaaaagtgtaaaacatttaagaaaccagatgagtgaattttcacaaagtgaacacgcctgggtaagcagcacccagatcaagaactagaacatgatcccaggagccctgtcgtgcccacggttcaccgctcccccacctgagggcaaccacagtccttttctgaactccacatggtgacttttcctgctctggggtggtccgggtgtggaggtgcagtatgttctcctggtctggcttcttttgctcacactgtgtgtggggtgcatccccatggccgggtgcctcatctgttctcatccatctagaatattccatggtctgttgcgtcaccttttgtttctccaaaccctattgatgagcatttggattgtttctagttcgggctactataaataaactgctaagaacattcttgcgtgatcctgatttaaatttcatcctagcacgtagactcaccagttatggtagacactgaattgttctgtattgccatcttccccattcgcgcctaagccccatgggacccaggctgtctggatcaccctggtaaccaagcccctcacacactgcttgcacacagtaggtgcttaatgtgtgtctggaggatgaaagaacaccagctccccactccccagggcgtgtgttaagggctctcagggacggtgcttatcaagggttaaccttggggcgcagaacttgaatttgcatgcactttgactacggaccccagacaactgccaggcaaatcttagggaaatgagccccttaggctctgggagaggagcagcccagactggggtgttggagggacctgcttcctttccgctggctgcctgtccctggctcccacctgcctgagtgtcctttttatagccggccatgggctcccccggctctccccagacagtcgccagtgggaacattcctggggcttctcgagtgcctccaggctcccgccctgatggctgaggtctggatgataaaggacaattagggattccgactccagcgcccacctggcctggcttctatcagagtcctgtaaaaatagcctgcctctggctattttgggtcatggaaaaccacggggagacacactgttctgaggaggaccgagaagggaacccagaacagctaatcgcaagcaagcccagctgctcttccagcaaagaagaatgttgctgaagatcgcaaattagcagctctatgtaagaataatggcacggtgcacatgcaaatgtacccctacacacacgcacacacagagcactccctcctgtctccgcctgggccactggcccgcagaagctggcttgcctggccctgggacatttgagctcggccctgggatgacttggctgggggtggggtgggtgggggggaattccttgaggagagtcttgcatggcaaagggcagccagatttctcactgtcaaatgaggcatgaggttcactttgaactcctagctcatctaggtggaaagctctaccttctatgcaaagaactctcccatgaaatgaactcagcctctcaaagtctctttgtttaaagctaatttaagaacattttaaatgaaaagggggtgctagaatcccaccaccagctcacccgggttccagtttacatattcccttcctgatccacctgggcgttgtgcatctggtctgtccaggggccttaaagtgacaggaagaataatgaatgttgtcaagagtgcagacagctggctgccggcaccgccctgaggtgaacgcaatggcttcacagctttgctgaccagagtgtgagaggcgaagctatcagcgccctcggccctcggccttcctcctaccagtgagcctctttccccatctgtgacatggaacaggacctacctcacaggtggttgtgtggattcccattagatgagggttgagtgcagggctgggttaaatcagcggaccctgcaggctgtacccttagcttagcttagcctctcagctgaagatttaggtcattttaaatagtcctttgttatctgaaagggctctggaattctgcacccacaacctccttcccttcccttttctcttcccttcttccccttccctccactccccacttttctctcaccttaggtgaggttcctggaagtggcacgaatacattttgcagacctggctccaaggacaaccagccaggctccttcagggggctgtgatctctgcgggaggggtgggggctgaaggtccctgacccctcaacatctgcccagcatccgcctgaccctagcctagtctcacctgccttttggacgggagcctctctgcctgtgcaccggagctgctcagcgcccacaggcccgtgcgggtggcagcactgctcctgtccggcagctgctggggtcctgcaaaggggctgagttaggaacccccatctagggcagaagagaagccttaattccctggggcagtgcagggagagccatagcctgctttcccctctctccctcccttcccttctctctcattttccctgcatcctctctctctctctctcccctttccttttctcttccctcccgtcttgtttccatttcccctaatctccagggcaggcacaattgtgctggccaagtgcccagtgggggtttggagtgggggtcgtttagcttctcctgccctggaaactaaactgcagtgggttgggagccggtaacaaggatttacgtttcggggttgccctcaccatttcctttaacacatgagtccaaggtggccgcactggccggtggagatggagtggcagctgccacacttcccggatctcccctctgtctctagggtgatgcttgggtgggtgaggttgggggatgggcttggggcctgcagcctccccacaaaagccagctgtccagaattcggaggccaacagggaacagtcccctgccctggcccaggtgtctgccttctgagtgggcccggggggcctgggctatgcacccccagaggtgggacctgcccccaggatcacggagacatccttgcttggggggaccattctctctgtgaggactgtctggaagagggcaggcatctgggcctcgcctgtccccctcccttgcgagggagtaatgaaggaagttctggctgcccaggctgttctttccaagggacacttcgtgaatgcaagagccaggacgatgctggatggcacaagagcaaggcctatccaggcccctcggcctcccagccagtggcttgtaccctctgagcctctgcctctcccctacagggctgcaggatggactgggtgggacctcggggcgggcgctaaccagggcagccactgcagtacttctgaacttgcagaggggccaacctagacttcagcagagatggagcaaaaccacctgagcgtgggggtcagagcctgggcttagggattaggtgagcacctgttggaatcctggatcagggtcccatgagccagcgtggcttatggtccttaggcaccctttccacccctaccccaggcccttgctgtcccctgcctggcctccctctctcacaagactctctccttttgctcagttgtcaaattctctcaccacccccttaagaaatgattaactcaccctcctcttcctagagctccctgctcccattgctgcccttcctccacagcatggacaccctctgtgccacctggtatttcactgactcctttaggcaaggactccatcccttttattccttgcacttagaatagcacctggtacacagcaggtgttccataaatatttgttcaatacacttaataaatgggggctggagcggtgaccacacctgtaatcccaataccttgggaggccaaggaaggggcattgcttaagcccaggagctcaatagcagcctaggcaacatagcgaaaaaattaaaaattagccaggtgtggtggtgggcacctgtggtcccagctacttgggaggctgaggtgggaggattgcttgtgcctgtaagctcaaggctgcagtgagcagtgatcacaccactgtacttgatatggtttggtggtgtccctacccaaatctcaccttgaattgtaataatccccatgtgtcaagggcagggctagctggagataactgaatcacagggggataactgaacagtatgggttcccccgtattgttcttgtggtagtgaataagtctcacaagatctgaaggttttataaataggagttcccctgcacaagctctcttgcctgccgccatgtaagacgtgactgctcctcattcgccttctgccatgattgcgaggcctccccagccatgtggaactatgagtccattaaacctctttcctttatagattacccagtcttggctatgtctttattagcagcatgagaatggactaatacagtactccagcttgggcaacagagcaagaccctctctctaataataataaataatgataaatggtatggcttatggttcatcgccaacaatggaaccacattttgatcctgcatccgagttgccagaactttcaggtacccgtgcagcagagatttcccatctctggaataaagagcaggaggaggatgatcactgcacaagcagccggggggcctcacaggtccctacatcctgggagtgtacagagagaagaaaaggaagctgtggactcgcccccaccactctgtgaaggactcactgagttctgaaagcttccacaagtgtccgggcagcccctcagctcttcacagcaggaagcggatgtgcagacagccatagctcattgttgcagcctggcatgtttcattagtggtttcacaatccacactctggccctctcttcctctctgcctgcggggggacgctggggaggcgagttctgccccacagccttgcacctgagctccgtctgctccacgttgcctgagctctagctcccagggagcgtctgaaaatgccctggccagaatccctggggagctgcagcaatcctgaaccgggcctcatcccagagttcccgtgtatttcatgcaggtgtggcttgggcactagcagtttttaaagttccctagggaattctaatgcacagccaaacttgagaattgccctgttaatggatcttagtgaatagaaataatattaactatcctttatgaagctgcttctgcctgccaatgcttcttcgcaaatgtcccaaatcgagctccctctgggggccaggcagggtgtgtaattggaagaagtggactgagggagagacaatagggaaaagtggggactgtggtgaactggggaaccacggcccatcccaaaggggcagccacggctcagtacagctgattgtcaacaccccagaaagcagatccagtgggtgagagcctcctacgagttaagagaaacaggaaatctgaattttaatgtgaaatttgccagttaaaaaatattagcaactcatggagattggatgggaggcgaatcatgctccttggttgagtggagcctgtgggtgcccagtttgaggcccttgcttcaggtccatttattttttctttgctgcaatgtccatgggagctagatatttcctattctctttttagaggtgaggaaacagactcagagaggtaaaattgtttccaatttgctgaggtaggcagagtaatagctcccaaagatgtccatgtcctaatccctgcaacctgtgatgtgctaccttccttgccaggggaattaagtggcagatagatttagggttgccgatcagctgcctttaagagagggaagttatcatgggttgctgggtgggtccagtataatcacaggggccctttaaatgtggaaaagggaggtaggagggtctgtgtcagaatgaggaagacaagaccagtctttcctggccttgaggatggaggaagaggctatgaaccaaggaacgcaggcttctagaagccagaataggcaagaaaatggattcttccccataacctccagaaggagtgcagccctgccaacacttggattttagctcatcttagacttctgacttccagaactgtaagagaatcactttgtgctgttttaagccactgaagttgtggcagtttacagcagccccaggaaatgaacgcacctacccagctaaataagagacagtgtcaggatctgaacccaggccgtctgactgcagagcccgagatctgagctagtccctgcacctctgaaaggatggacacaccagagggcctggattttctggtacaaccctgatctcaatatctgcttctttgtaggaggatgagtttggggaagtatagccctcggcctaggggacaagaaggggatttgctcatcaagttgatgtctgcccaacagctgtcgagcccccatgtggcaaggactcttagatggctccaggatcctttctctctgtagtaacaagcccctgagtgtcaggtggaggcccagaacgcaccctccatttcccgccccccttgtggttagagatttggatatggtcctgtggctggcatccggccactgggggtactcagaggcacggggagggccgagttgggggtgaaccatcctggattatgcagacagggcaccatttctggcactttctggcacaatttctgccatattttggcagcagctggccagagtgggatcttagaagggtcagcagtcatggtggagggggaggctggcattgagcctttactagaagctgtctttgaaacatcacatctttctctccccagaaggtctgtcacttgaatattttcctttattagttaaatgaggtttggctacaaggggcagaaaacaaaacaagcagaaatcacaatcgctctttaaaaaagaaacgggattctcctggcatatttttctttcctataaaaatgaagtccggggcagcattccagggccaggaggaggttccacaaagtctttagggtgactcatgactctgccatcctcagggtccaaaattattgcgtgagctccagccatcacatcttctttccagccaggaaaaaggaaggaacagagaaggatgtcccctgttcctttaaagaacacttgagaaaacttctgctcacctccctgtttcacgtggccatacctcactgcaaggaaaatgtagtctttattctgggtggccatgcaaccccctgaaaactgggggtcttacaactagggcaagagagggcaagagtggatactgctgtagtctactcaatcagatctgttccggccacggggaggagctgaatggaacagcatcattccatttaaggcaattggctatgcgttcttggacaagtcacctgatccttctgggcctctttttgctcatctgactaactaaaatcagattaaaaggtttttagagtctccttcagtagaatccttctatgggtctaagaattgtctcatttttagccatagaccatatcaagatgtagagacactggtgggtactgcctgagtgtggtatcttctgtgtcagactgaccaggcttcaggtcctgtggggcctgggaaacgtccttcctcctctgagccgggtccctcctgctggccagactcggatgaagtgactgtaaagttcccagcttgccactcagcaactctagcaacaccagcaaattactaacattctattaataaaaacgacagaggaaatgcacctgtttcctattgctgctgtaacaaatgcccacaaaggtagtgactcaaacaccacacatttattcccctccagttctggaggccagaagcatgaaatagactcacagggctgagggcaaggtgtctgccgggctgtgttcctctgtttcctacccacttgggcgctggcagaattcaggtcccagggctggaggaatgacctctttggaggctcagtaaagagctcctgggattatattaggcaacaggttggattcagttttaggaacagaattgccatttggaaattatgctccaaattctgctagatctgaattttttgaagtagccagtgcagacacagaagggcagctgtgagctggggtcccaaggaaacttcagaaagccgtgtccatagcatcttccttccgtggatcccgaggagacctctgggcccgtccgggcttccccccgcccagcttcagccgttgtggtttcaggcccgcggggggtccctgcctccctagattgtctctgtcccgctcccaaggccattcactctttctggcactcacatccccagacacgccccctcccacccaaggcccaagcaagtgcctcacagccctgatcccagccgcaacagaggacagagtggaatctgggagttaaacaccaaatggccaagggtggttttccactgagacctagagccgagggggccatcagcacccgttctctgaaggcggctggggcagatccagggcagtcgagcaggtggactctggcatcaccctgcccaggctcaaatcccagctccatctttgagctgtgtgacctgggatatgtttcttaacttctctgtgccttgcttttgacatttgtaaaaggtggatcatgatggcattttcctcccaggacaggtatgaagattacagatgaaatcaatccaacataattggtataaaccacttggcttaaggggtgcctgggacatccacaggggctctggtaactgcgattcctgttatgaccatgacaggtgacagcagaaggccccacccagctcccacctcagttgtatagactgtgggctctgcttggccatgtgtgttgtggggaaggagaccctgttttctcctgcctttgcagtcccattctctttcctaaggattctcttttccttcttttttttttttcttgagtcagtctcgctctgtcactcaggctggagtgcagtggcacgatcttggctcactgcaacctccacctcctgagttcaagctattctccctgcctcagcctcctgagtagctgagattacaggcacgtgccaccacacccggctaatttttgtatttttagtagagacggggtttcaccatgttggccaggatggtcttgaactcctgacctcaagtgctccgccctcctcagcctcccttctcttttccttttacagcccttctgagatgtctcttcttcggcgtttcattcactccccgcggcaccctggatgcctgttcacagctcggtccagatttctagagctgcttttaaagggcagctgccacccagtgttgctccctgtattcccaggtccccttgcagccgcagtgagcttgtccccattctgtagacggcaataatcataatagtattagtaacaatgatgataggaaacatttgcttaccactaattaaatacgagggtctgtactaagccggtgtccctgtattatctcacttcaagatctccggggtcacagaggcagcctgtttccagagacagtaactgaggcacggagagaggatgaggaaatgaagctgggagacggtgactagcttggtgttccttacaaatgggaggtggtggctggaataggccaggctggcctgactcagagtccagctctaacttctgtcaccagatttaaatgggattctggagttttaattttccccaagcagacgcttcctccttaacgtcacgatttccacacgtgctggacacatttggaggtggacagagatgaggcaaaattaaactttttcgagttgagtctggttactctgggtagaggatcttgcaaaaccaccttgctttgctgggagagactttggtcgtgaaagataaatgttctgccgtctgaatcagaggtaggacgccccatgctgcgaattgtggctgcttagaaatattactgtttattgagttgcttttaacaatttggtaaggaatttaaatcccccatcaaataaatgaattgttattagtttacaagagtggtcttggatttccacttctttctaaataaagcctcaggaagacaaaagggacatggggaaattgcaggttaattttttggtgtgctcgtgaaattccagggcgcatgcaaatgagggcgaagatggtcacacggataagagcttaaactcgccgagagcctgccatgccaactcactttaaaaaatcaaatatatgaaaacaataaactttataacgtagctatgataaatggagaacacaatcatttgccaacaacagtaataaaaataatgattatgatcagtcacatattttgagcatttactctgtggcaggcacagctgtaatgttttaaaactgatgttatccaaattagccgggcacggtggcccacgcctgtaatcccagctactcgggaggctgaggcaggagaatcgcttggaacccaggaggcagaggttgcggtgagccgagatcgcgccactgcactccaacctgggcaacagagcaagactctgtttcaaaaaacaaaacaaaacaaaaatctggcgttatgctttgaagctggtaccattgtttccattttacagataaggaaaatgaggttaaattcttcttccagtatgttaacaataggggtatccaatgaagacatgaaacttgcttcacccattttttcattttttcacccatatcctcctcctttcttccctaatttcacctattttcatccttaaaagtttagaaacttgacccagcagcaccctcctagcctaggctggtgaacaccctgttcctcacccatcttgtagctccgaagtgcccaccacaccatgcctgttggttaatgcagccttccccattgcagtcctgctaaggagggctgggacaggacccactctccgccttcccagtgtggggcacagagtgggttctcagcagacattgccaaacaaatgaatgagggaatcagtgaatgaatgaataaagcaaatgcagaagcaaattcagatccaaaatccaccagaggtgtttcactacgatttcagtggtccctgtctttggtttagcagcgatgtgtctttttgaggccctaaactactttcctaaaatgaggctattagggagcaccaaccctggacctcccccagggactgttgcaaggattaaaccagttaacatgctagtgtatcagaacagtgcctgacccagagcaaacacccacaaatgttaataacagtaataacaatattattattttattttatttttttgagatggagtctcactatagcacccaggctagagtgcagtggcgtgatctcggctcattgcaacctccacctcccgggttcaagggattctcctgcctcagcctcccaagtagctgggattacaggtgtgcaccaccacgcccaactaatttttgtatttttgttttggtgtttgttttttttttttgagatggagtcttgctgttgttgcctgggctggagtgcaatgtcatgatctcggctcactgcaacctctgcttcctgagttccagcaattctcctgcctcagcctcccgattacctgagattataggcacctgccaccatgcccagctaatttttgtatttttagtagagacggggtttcaccatgttggacaggctggtctcgaactcctgacctcaggtgatctgcccacctcggcctctcaaagtgctgggattataggtgtgagccactgcgcctggcctattataattttatatatgagatatatgatgtctacctatcattaccatttaagacaagtgatatgggtttcccgtgtactgtagcactgtgagattttattttaaaataaatgcatttgattttaaaaagtgagttggaaataagtaaatatcggtgcgggtgaatcctagacaggatcccaatcccgaggtggtgttcaacccctgggtgtaggacctcaggtgaagggttactcaatttggggcagcttccctaagccatgattgtgccgcacgcatggctggcagcatggatgtcagtgtggggaggcccaggcccttggaggaggctgaggcagccttgtctgggaccccaggtacgcctccagccatcttccccacagccccttctctgagcgcgcagccatcaccccagacccgggctgatatttttagcacacaggcaccctgcacggccctgtacactctgaccaaatttagaaatctcaagagatctttgcttttctacgccttcagaaggagcaatgaatgaaaaggctcccagcctccggtttagtgagagcaaaccctcctgtttgcagggctctctctggtagggaaccccaagctttactgtgcagtgaaaaaaagccaggtgcagaatcctgtgtgtgttttgggtctacggtagcaaatgcaaagcaacccctgcaccgtgcacgtgtgtctgagtcagcacagccagcagcggggcgtggaaggagccccccgcaagtgggggaggaaggggctgtggaggtgattacctcactctcatgcagggctgaatattactgtttcccctgttaaacaagggtgtattacttccgaaatctgacaaccccaagcaccaaaaggtttaaaaatatctcgagattgtaaagcctccgacagaatgctgaaacaggattgcacagttgaccaggagcttctgaggttgtggcggaccctccatgtttctgactgccggacagtcacagccccctcttccctaatgccaccagatgttccctgggacacctgcccccagctctagtccacataatgctgccctccacctccagacccaggggaggggagtggtcagggccggccaagccaagcaccgtatggcccctggttcaggacatcgctgggacccagaggccagagaccttcagctgggatccccaaggatcccttgggacccctgggactgttgtccacctctgtgccaccaggagaggagagccccactaagactggagtgacaccggaaggtgcaaccaagagcaggcagggagaacacggagtgcaggcgctgcctgagcccctgccctgggctgtgtcgggggagctactgtggaactttctgtctatgcaggctcagcaggccacagtgtgcaccacccggctcctgccagtgaacctacaaacgctgatggctagattatttgcatatgtgttgttaaatatggccaatattaaaattaaatgatacaaacatgtaattaaaggaattacattaaaaacagagataatagctcctcaggacacctcactccctaattagcatactgcacttcaccattccccaggctcttggggtgccacctcggctgcatttgggggaaggaaatgctttaggtctggacgtgcattcctgtgcgtcctctggatagcaggaaatctgccagcatggaaatggcaaatgctacaaacaggggtccccccaaagccattgcttcccagcatgcctctgagagaagccctgtaacacaggccagggggcacctgctctgcaggaccccaagcaacaggaaggaaacaggaaggagaaggggaggagagggggaggagagggggaggagagggggaggagagggggaggagagggggaggagagggggaggagagggcaaggagaggtcttcggcatccttatggtgaaaaccacattttctcctccccatttccctggtagctgggaagcgcattcaattaacgtgtattgattggcttgaggaaatcgggctcccagaagtctagggccttgcttaaggtcacctagcggtggggcaggaactgggacacagttttaatttgactccggagccctggactggccttgtaattggtacttcttgtgcagtgctcacggacacctcagctgaatgaaggccgtgcaggtggctggacagaaacgccctgtagcccgcatccctcacgttcaaggcttctgttttttcagcactcatttctaagtggcttgcagccttgcaagatgaattgtggaagtgcatgggcacagtacttaaaaacatagagtcccgagctgaggcaggtctgccctttccagttattttccaatccttgtgattacaaagaggtttcttatttaggggtgagcctgactttcacactcgggcaggctccactggcagccagcctcctgtgtcccagcctccaacagaagttaaagacacgaggagggttcaatgcattcactttgggggatccctcctgcttattaagaaaatgattttccatttttggtaacagtagagttttcttttaaaattatttaagtaaatttggggagcaaatgctacagatagttatggaaggcatcctgagctgatgggcagttgctggatttgatgggaaaccaggatccaattcaatttcccagagaacccgaggcctggcgcgggcagggagggtcaaggaagggaggagcccagggtccggccctcggccccaatcagggaatgcagctgcctcagaaaatgctggctttcatatgtcagggacaaaagggacccttttttctcccctttttttagttagaaggaaacctttgagccatttataaagacaggctcgctgacttatgggaaagtgggcttctctactgtcatttactaactggtatgctttagctctgtgtccccacctgaatctcatcttgaattatactcccataattcccacgtgttgtgggagggacatggtgggagatcatttgaatcatgggggcagtttcccccatactgttctcatggtagcgaataagtctcatgagatctgacggtttgatcgggggtttccgcttttgcatcttccttatgttctcttgccgccgccaagtaagaagtgtctttcacctcgcgccatgattgtgaggcctccccagccatgtggaactgtaagtccaattaaaccacttttactttccagtctcgggtatgtgtttatcagcagtgtgaaaaccgactaatacgctaactgtcatgtgtctggacgtgcgaaaaatccctaaatgggtgagaatcatgtgtttctgctacagtctgtttcagcaatgcaagtcttgggatggattagatcaaccttaagtaataagaacaaacccagtcttcagaaaacttttgggggttccaatagcatttaccatggggcctggtgaaacatgagctttgtttcatccggctgctgctttgcgggaggatggagcagagcaggagggggcatggctccagacaggtcgggaacattctcagagttgggcccctggatgaccctgtcctggtcaatgcaaatacagagccccaccctggcaagaggggagaggcactgccgtgatttcagtttgtcttctgtcatgttctggtgacctctcaacagtgctgtggtccttggggcatgtgcactgggagtggggggcttttcgctcacctctgaggagatcctttctccctccagtgtcgattcattctcacttaattaaacttcaagttttaaaaatgagaactgtccaacccaagtgtcatcaatagataaacagataaacaaaatgtgatccccctcatgcaaaggaaaattattcacccttaaaaaggtaaaaaaattctgacacaggctacagcatggatgaacctcagtgaattatgctcagtgaaataacccaggcacatagagtagtgaaattcataagggatgggaaggagaatggaggtctccaggggctgggtggagggggatacggagttaatgtttaatgggggcagagtttcagttcggcaagatgaaaagagttctggagatgggagtacaacaaggggaatgtgcctaacacccctgaactgtacgtatcatggctaagatggccaattttctttttttttttttttaagatggagtcttgctctgtcgcccaggctggagtgcagtgacgtgatctcggctcactgcaagcttcgcctcctgggttcacaccattctcctgcctcggcctcctgagtagctaggactacaggcacctaccaccacgcctggctaattttttttttttttttttttttttttttttttagtagagacggggtttcactgtattagccaggatggtctccatctcctgacctcgtgatctgcctgcctcggcctcccaaagtgctgggattacaggcttgagccaccgcgcccggtaagacggccaattttatgtgtatcttcctaccacttacaaaaaggataccatcaagagcagtggaagtctgtttgccagcgtgctgggtcctaacaaaagaccccactgacttcagtcctgcccagcttgctcactgcagcctgctctgggctctgatgttcatcacggcttggagttgcttccccagacagagtacagcgtagctgaaagtccactgttagcgggttatcggaggagagcacttaccagcggctcacctctgctgactgctgtgccaggctgtgtgaagcactgtactcccatactcaccacagccacagaggacagcccgtggtcactcctggggaaaagcagacagccgaggctctgatgggccataaaaaataatccaaaaagtggcaaggaaaaagagaaaacaatacaactacagaaatgataacattacatgtaagtggtccaaatataccaattgaaacacaaagatggttggactggatgaaaaagaaactgtataaataataaacacctattttaaatatgaagatatgtcatttaaataaaatagaaataagtaaatataagtatgtagagagtaaagagaaaataactagagtaaagaaatagaaattttaaaacatgtccttaatctgataaagagtacctacaagggtacttgatatgattttgattttcttcaatttattgagacttgttttgtggcctatcatatggtctgtcctggagaatgttccatgtgctggtgaagagagtatgtattctgcagttgttgggtagagtgtcctgtaaatagctgttaagtccatttgttctggggtatagtttaagtccattgtttctttgctgactttctttcttgacgacatgtctagtgctgtcagtggagtactgaagtcccccactactattttgtgttgccatcgaactcatttcttaggtctagtagtaattgttttatgaatttgggagctccagtgttagatgcatatatatttagaattgtgatattttcctgttggactcatccttttaccattatctaatgtccctctttgtcttttgtttccccactgttgttgtttttaagtctgttttgtctgacgtaagaatagctattcctgcttacttttggcttccatttgcatggaatatctttttccacccctctaccttaagttctatgtgttaggtgagtctcttgaagacagcagatacttggttggtagatttttagccagtctgccattctgtatcttttaagtggagtatttaggccatttacattcaagaagagcctgcatagccaaagcaatactaagcaaaaagaacaactctggaggcacatattacatagtcttcaaactatactacaaggccatccttatcaaaacagcatgattctggtataaaaacaggtatgtagaccaatgtaatataacagagaataaagaaataaagtccagtacttaaagccaactgacctttgacaaatcaaacaaaaacataaagtggggaaaggacaccctattcaacaaatggtgccaggataattggcaagccacatgtagaagaatgaaactggaccctcatctcccaccttatacaaaaatcaactcaagatggatcaaagacttaaatctaaggcctgaaaccgtaacaattctagaagataatattggaaaaactcttctagacattgggttgggcaaagagttcataaccaagaacccaaaagcaaatgcaacaaaaacaaaaataaatagatgggatttaattaaaccaagaagtttctgcacagaaaaataaataatcagcagagtaaacaggcaacccacatagtgggagaaaatatttgtaaattatacatgtgacaaacgactaatattcagaatctacaaggaactcaaacaaatcagcaagaaaaaaacaaatgatcccatcaaaaagtgggtaaagaacatgaatagacaattctcaaaaaaatatataaatggccaacaaacatgacaaatgctcaacgttgctaattatcagagaaatacaaattgaaaccacaatgagatgccaccttactcctgcaagaatggccatcattaaaaaataaaaaaaatagatgttggtgtagatgtggtaaaaagggaacactttactgctggtgggaatgtaaactagtataactagtataactagtacagagaatccttaaagaactaaaagtagaactaccatttgatctagcaatcccagtactaggtatctacccagaggaaaagaagtcattatatgaaaaagacagttgcacatgcatgtttacagcagcacaatttgcaactgcaaaaatatagaactggcctaaatgcccatcaaccaatgagtgaataaacaaaatggggtacatatataccatggaatactactcagccattaaaaggaatgaaataatggcattcatagcaacatggatggagttggagaccattattctaagtgaagtaactcaggaatggaaaaccaaatatcgttatgttctcacttataagtgggaactaagctatgaggacacaaaggcataagaatgatacaatggtctttggggactcggtcgggaggaagggtgaaagaggggtgagggataaaggactccatattgggtacagtgtatgctgctcaggtgatgggtgcaccaaaatctcagaaatcaccaccaaagaactcatccatgaaaccaaaaatcacctgttccccaaaaactcttgaaataaaatgtaaaaaagagtacctacaaaaacttacagctagcatcatacttaatggcaaaaaactcaatgatcttccactaaactggaaacaaggcaaagatgtccgctcaccgcactcccgttcaacatcatgtccgaggtcctagcaagtgccatatggcaagaaaattaaaacagacacatacagtttggaaacgggaaaataaaacagtctctatttgcagatggcatgattatctatacagaaaaccccaaggaatctacaaataaacaatttcaactcacacgtgagtttagccaggctgcaggttacaaggtcaatgaacaaaaattaactatactagcaccaaagaattggaaattgaaattgcaaaaacagtacgatttatttttttatttttttaataaaaaaattgtatttacttagaagcattcagaatgtcaacaaaacagctgcaactttttttttttgcaattacagagtggtattcagttaacagaacaattatttcgtataagctgcatcagagacaactgaagatgaaaaaactaccatccccatatataactaatttgtgctgcgcaccaacaagaacctgctttaaatttccatgccaatttacaacccccatactctaccaggcaaggttagtgactattgaaaataccaccaggacagggccatctaaagacacatttggtagtgtattaaccatacaaaaaacgacactgtacagtttaaaaacaaatcttacacagccttacatttcaatttttttctttaaaaggagtgagttgtgtacaggggcgttaaatgctttaagacaagaaaaaaaactgcgctagagccaacttattcatcatcatcatcttcttcatcttcttcatcttcctcctcctcatcctcttcatcttcctcatcttcctcctcttccttctttttcttgcttttttcagctttgacaactcccttttttgctgcctcaggctttcctttagcttgatatgcagcaatatccttttcgtatttttccttcagcttcgcagccttcttttcaccaggctgcttgtcatctgcagcagtgttattccacatctctcccagtttcttcgcaacatcaccaatggacaggccaggatgttctcctttgatttttgggtgatactcagagcagaacaggaagaaggccgaaggaggcctcttgggtgcattgggatccttgaacttcttttttgtctcccctttgggagggatataggttttcatttgtctttcataatgggtcttgtccgcctttgccatatcctcaaattttcctttctctttagcagacatggtcttccacctctctgagcacttgttagaaaactctgagaagttgactgaagcatctgagtgcttcttcttatgctcctcccgacaagtttgcacaaaaaatgcatatgatgacattttgcctctcggcttcttaggatctcctttgcccatgtttagttatttttcttcagcgaggcacagagtcgcccagtgcccgtacggctctcacttgccccggcgctgtctctatggagctcaatgtactgcagtggctaacagtacgatttataatagcactctccccaaaggaaaatccatgacaaactttgatacagatccaacatctgtgcaagatgtctacgatagatacaaaacaatgatgaaagaaatcaaagaaggcctaaatgattggagggatacactcttctgttcacggattgggagactcagtattgttaaagtgtaaaattctttccaaattgatctatacattcattcccccaaagatctcagcaacattttctttttgcataaattcacaagtggatttgaaaatttagatggaaaggcaaaggattcagaatcaccaaaaacaactttagaaaagaagaacaaagctggaggacttgcattatctgagtttgaggctgactatacgctgtcaagacagcctggttctgatgaaggactagcttgggaaagaatggagctacaacacccacacatgtggccaatacttttttttttttttttgagacgaagtctcactgtagcccaggctggagtgcagtggtgtgatcttggctcacgacaacctccgcctccatggctcaagccattcttgtgcctcagcctctgaggagcagggactacaggtgtgcgccaccacatccagataatattttgtattttagtagagatgaggtttcaccatgttgcccagcgtggtctcaaactcctgagctcaggcgatctgtcctcctcggcttcccaaagtgctgggattacaggcgtgagccaccgtgcctgtcaatacattttaatacagctgcgaagagaagtcaagggacaagggatagtttttaaaatagatggtgctaaaacaatacatcaaccatgtgtggaaaagcgaaccttgatccacaccttgggtcataagcgctatttggctcaaaaggaatcacagacttaaatgtaaaacataacattataaaacttccagaagtaaacctgggaaaagaccttcgcgaccttgagttatgcaaaagatttcttagataatgacatcaaaagaatgattcattggttgggcgtggtggctcacgcctgtaatcccagcactttgggaggccaaggtgggtggatcacaaggtcaggagattgagaccatcctggctaacatggtgaaaccctgtctctactaaaaatacaaaaaattagccgggtgcggtggcgggcgcctgtagtcccagctactcgggaggctgaggtaggagaatggcgtgaacctgggaagcggagcttgcagtgagctgagatcatgccactgcactccagcctgggcgacagagcgagactctgtctcaaaaaaaaaaaaaaaaaaaaaaaaaaaggaatgattcatcaaagaaaaccggcagataaattagacttcatcaaaattgaaaaaaaaatttgctgtttgaaagacaccattacatgaatgaaaagacaagacacagactggaagaaaatatttacaaaacatatgtctgataaagaacttgtgtccagaatacataaataactctcaaacaacccagagtacaaaatgtcaaaagctatgaacaggcacctcacagaaaccatctgcagatggcaaataagcatgtgaaaagattttccaaatcattggctattagtgaaatgcaaattaaaactgcagtgagatttcactacatgagtagtagaaaggctaaaattaaaaacaaaaacaaggccgggtgcagtggctcacgcctgtaatcccagtactttgggaggctgaggtgggcggatcacgaggtcaggagatcgagaccatcctggctaacatggtgaaaccctgtctctactaaaaatacaaaaaaaaaaaaaattagccgggcgtggtggcgggctcctgtggtcccagctgctcgggaggctgaggcaggacaatggcgtgaacctgggaggcagagtttgcagtgagccgaaatcacagccactgcactccagcctgggagacagagcctgactccgtctcaaaataaataaataaataaacagaaaaataaataaataaaataaaaataaaaacgaaaacaaaagtgtgactgggcgtggtggctcacgcctgtaatcccagcactttgggaggccgaggcgggtagattacttgagatcaggagttcaggaccagcctggccaacatggtgaaaccccgtctctactaaaaatacaaaaattggctgggcgtggtggcacacacctgtagtcccagctactcgggaggctgaggcaggagaattgcttgaacccaggaggcagaggttgcagccagcagagatcatgccactgcactccagcctgggtgacagaatgagacgctgtctaaaaaaagaaaaaaaaaaaaaagcctgacaatgccaagtggtggcgaatatttctgatggggctgtgggcatgcttggaccttgctggtgggagtgcagagtggtgcattcacgtcagaagacggtttggcaatttcgtataaacatacatctacctagtgacttagaaatctcacccctaggtatttgcccaagggaaagaaaaatgtctgtttacacaaaacctgtatgcaaatgtttataatggcttaattcataaacctctcaaattggaaagaaagccaacgtccttgaactggtgaatgataaagcaattgtggagcgatcagacaatggaatatcactcaacaatcaaaagaaaggaacagtgagccaccaaagagcaggaagaatcttgaagtcatttgttcaatgaaaaaagccacatgcaaatatatagtgtaggattccaggtatgtgacattctggaaaagataaaactatataggacaattgaagcaaaatccggtgctgggggctgggagtaggggtagtgcttgactacaaaggagtattacagaaccaaactggggtctgtttgccatagttaaactggacatttacaccaaggtttccagtgataggaagaaaggtttttattgtagggtgtcaagtatggagaactaggcagctgaatgtttaaattctgacctccccgatgacttgcaggtaaggatttttaaaggtgggtggaaagtaacagttacaggcaaaattataaattaatatagaaggttctattgttggttggtttagacttaaaagggccagcatgtcttcaagtgtaggcttacaggttgtagacagattcaaaggttttctgatttgcaattggttaaggaagagaagctttgtttaacgatctggggtcagtagaaaaatgttcactggctagggggagtgaccgcttagaacaaaggatgatgaataaagattagtttttacttttcttaaatttgaggtttatgtgtctggatctgtctgacgggagatcttagaggggttctgaggttttgaacgactcagtaacatacgttaaggtgtgtctttgggttttacagggaaagtaaacattttggggactttaacttttttagttattgtcttagcttattattttgttttagtaagttctttacttttggggctagctaggtgtctggatttctttctgaaggaactcagggctttttatgtgtggggtccacaggcccctaaaaaggggatccctgttctaattttgggagcacagtgggatgcctggggtgatggaggtgccccatgtcttggttgaagcggtgattacgtgaccattcatttgtcaaaactcatagatacttaaaagggggaattttactgtatgtaagttatatctcagaaaagttttttaaagacttaaaaatatgtaaaacaatgcattgttggaaagttgcactaagaagagttctgctttgcacttcactgagctcaaaagctgcgtgaggaaactcacttctgtttgcccaagtggaggcctcgccttctcacgactgatttctcattctttatggaattaaaaaaacatatctatcaggaactatctacctgtctgcatccatccatccaaacgtctgaagtcatcctactcatggcaatacatggtaaggctaatttttaaaaagcaccagttgctcttatttggaaatgggtccgtatcaccaaaggtggaatattacccagatataagaccaaacaagctccaaacaaactctcagagtcagacagatgagttgatgaatcctgcccacactccacgtgaccgcgtctgcctccaggtggaagaggaaaccgtgtagtcaggccccaagtcttcttgctgcctccctcccgtcccccgggccttgcctggccactgcaaacctggggtctcgttggctcccctcccatgtcacctgggcatgcaattgtgctggtcactccgtggaggaggcctggcaaattccacagcatgggtcatgtgtcacttccagaggctctggaacaaagactgggtgacaggccagcagagagatgctgaattgctcttttgggttgaaccacccagaataaaatgctaagggcctggctactgagagaatctccggttttttgaacatctgtgaaagcaggaggttaagtctgcagtgcctgaggctgcttgcaccactgcgctcccgcctgagtgacacagcaagaccctatctcaaacaaaaaaactctttaattgtgccacagtggatgaaagctggctgcagagttcatatagaaaggctgctaatagctcctctcagcctcctgagtagctaggaccacagtcacttgtcactgcacccagctgattttttaaatttttattttctgtagcaatggggtgtccctatgttgcccatgttggtcttgagctcctgggctcaagctatcctcctgcctctgctcccaaagtgctgggtgcctggtctccattaagattttttatttttttgagacagggtctcattccgctgcccaggctgaagtgcagtgaggtcattaaggctcactgtagcctcaacctccctggctcaggtgatcctcccacctcagccccctgagtagctaggactataggtgcataccaccacatctggctaatttgtgtgtgtgtgtgtgtgtgtgtgtgtgtgtgtgtgtgtgtgtgtgtgtatatatatatatatatattttttttttttgtaaagacatggtttcaccatgttgcccagactggtctttaactcctggactcaagcaaccctgcccaccttggtcttccaaagtgctgggattacaggcatgagccaccagacccagcctaattaagtttgttgatggcactttttgtcctgacaaagcgcagtgagcatcccatacagtaatctatctgccatgcacagaaaaataaacatatgcatcttaaaatgctaaattatgcatactttaaaagataatgatttaaaggaaccaggttcataatcacacccatgccttggaaatggttcaaaagttactaaaaatagcataaactaggctgctttaggaattgggggcagtgaacatgcaacctgactctctctcacttatccatcgtgttgaggagcatttcactccttaaacttaaaatctgtgtttatccgatactgtcaattaaaaataaactgcagtgaaagcatgaggagatgcggaaagtcgatttgataagccaaatgtcccgaggcttgaatggaacatatttaagcagaactaacaatgccctttagtgactaatagtcataaagaatgcatttacagggactattcaatggttatcagaaaaaaaattaaacatttatactggaaataatatctggaaaatatcttgccattttcaaaaggtaggctgtcaaactttatcatataaaatgacttcagtttcatcacgcccatccagccttttcagtgactgatctcaaacaatagaggctgttaacatgcatcagccaggtcttaggtttgtttaaaagccatcctttatatagtaaaactgttgtcaaacaatgttgtaatttaaacaccccctccctgcaaaacagagatgttacactgtgcaagaggtgtacattccggaattatttcctgctggatctcaaaactattttaagcaaaagcatgtcactcaccaagcattcacgaactcagagccaactggtgtcctcactcccaggttttgcaaaggtcccttctcttccttgccaaggaaaaaatgttctcgttctgtatcgcggaattaataaaatcgccaagactttgctataactttccgtgcttcctactctcgaatagtgaacctgtctcaatatcggaaaagacagaagcgactgccctcttgcgggcactattgtcactgcatctattttggtatcaaaagcactaactgcacttgaggaccaggtgtttcaccttcttgccaggtgtgggtgagagtcacgcacgtaactgagtaggtattgatcatctcatctgaattttgttctacatctcaacaggtgttgcacacacgaaacactgcaactatttataaaagtgtgcttataggagctttcgtcttgagacggagtcccactctattgcccaggctggagtgcagtggcgcaatctcggctcactgcaacctccgcctcccgggttcaagtgattctcctgcctccgccccccaagtagctgggattacaggcacctgccatcacgcccggctaaattttatatttttaacagagatgggatttcactatgttggccaagctggcctcaaactcctgacctcaggtcatccacctgcctcggcctcccatagtgctgggattacaggagtgagccactgcacccggcctaggagttttatttatttatttaaaacagtgtttagataccaacttggcttgcgttttcaaacatatttatgttatctgtttttgaaattaacatacatttggttgtagtaaaatacatgatatagtttggatatttgtccctggccaaagctcatgttgaattgtaatccccagtgttggaggtggggcctggtaggaggtgactggatcacgggggcggtttcttaggaatgatttagcaccatccgcttggtgctgtcctcatgacagtggcggttctcaaggaatctggtcgttcagaggagtgtggcgcctccccctctctcgctcctgctttcaccatgtgacgcgcctactccctcttcgccttctgccttgattgtaagtttcctgaggcctccccagaagccaggcagataccaacatcatccttcctgtacagcctgcggaactatgagtcaattaaaactcttttctttataaattacccagtttcaggtatttctttatagcaatgtgagaaaggactaacacaacataaaatttaccattttagctatttttaaatgtatggttcagtggaatgattaggtagattcacactgttgtgtggccatcaccatgactgatctccagaactctttcttcatcccaaataaactgtgtccactaaacactaactctccattctccctcacccctcagtgcttggcaaacatcactttaccgtctgtctctatgactctgactgttctagatacctcctataagtaagatcatataatacttgtccttttgtgactagctgatttcactcagcataacgtcctcaaggttcccccatgttgtagcatgtgtgagggtctccctccttttgaaggctacataatattccactgcatgtatataccacattttgtttacccattcacccgtccatggaatttgggttgttttcatctttgactattttgaaaaatgctgctatgaacataggtgtgcaaatacctctttcagactctgcttttagttcttctgggtatacggtatatctggaagtgggattggtgggtcagatactaatgctatttccatttttttttttttttttttgagaaactgccatactgctttccccagtggctgcaccatttaacattcccaccaacagtgcacaacggttccaatttctccacattctctccagacaaagaagatgtttttaaagaccaatgctgacatataacaaatatagcaattttaagtcatttcattttattgaattatgtaaaacatctttaaataacagtaaaaaaattaagaaaccattgcacaaattcagtcacaatgatggcatactacagcccacagaatttaaatctcatgtgagttgagttaaattaatttgctggtacaaagagaatataatgctcttcctgctgggaaattatttccacatattcacattgtatagggattctgaacttgtgatattttcaataaaaggtccatatcttaagaatttgaatttagggcttatcaatgatcttgaaatacaggggtggagacaggttggcagcaaaacaaactgctcaactaagcaatgaagaaaaatctgcctctgtatccagatagaaatgaatttcaagtgttaaagaggcatctctcacgctgctcgagggtggaaaaatcttgtcaactggcaaaagggaaatactcactaatcactgggcattatgaaaaagtacaaattccttacaggtacacatttgccttatctgattttatgtttcttctcactctgccaattattttacaaatataaaaagagtagttttagcagaaaaaagggttatggagtgaaatactaataagcaataatggaatgtaaccagggcaatttcatacctgccaaggagcataattaaaagagaatacaaaaatctaaaggtgaaccttgctcctataccaaagtaaaatcgatttattccttattttctagtctaatctagtatttcatttcctactcagttttcctttttataagagtaaaacattttttggttgaatttagaactaattaaaagcattatggtagctttaaattttgtagaaaattcatttgtataaaaacatttgtctttaatgtttaaaaccatatattattagaaatatcatgggtgtatataatgcaacataaaaatgtccagctttgactgtggaagcactagctggtctagactattttgaaatatccaaaaatcactactcactcattgtgggccaccttgccaatatcaagtgaatgaatccataggtttgaggtgttaccctctcattcaaggtttaaaacttttataaaatacctgcaatgtttctttgaaatatccagctacaaacaggagaacaattctagacactacctcaaacttgtgtcatccattgtcatgaacttaattgtttcaaagaaaatgctaaaaatttctaacttgctttaggaattaggggcagtgaacatgcaacctgactctctctcacttatccatcgtgttgaggagcatttcacaccttaaatgctaaaaacttctaacttgctttaggaattgggggcagtgaacacgcaacccgaatccctctcacttatccatcgtgttgaggagcatttcacaggtcacgccttcatccacttcctctttgactctggctgtggtttctctgcaggcgacaggaaacatctctcctgggaactgttctcccttcgtggtggaagcctcctcagcagcagcttcttgagaaaaagtccaggatgagcaaatttatcagaaagctaaggaattggaatttataaactgtgcaaatatattttggaaaccatcacttaaatttgaacacggcagcaagcatgttagaaaacaatctaattgataagatggtactattctgatctcaactactgccttcagtcagggcttcttagcctcagcgctacagacgtttggggccagagagctgtctgctgggggcagggcgctgttctgggcactgtaggatgttagcagcgaccctggcctctaccactagatgccagtagcaccctcctctccagctgcaaaaaccataaaaatgtctccagacattgccagtgtcccctgaaggtgacggggggggggtgggggggggacacagtcattcccagctggcatcagctgctataggtgaatgtggatcttacagatttatatcgaggcggatctcagagatttatattgtggctgagctgctcacctaagtcttgtcccagtacccatgtaatgatgctgcctacatgaagaaagccagttgcctgcaggacatttgtccctttggccaatcgacatatactgagtactgattctgtgggttgcgcgttctgctagggatgctggggccagcgccaggcgtgtatccataacctgctccccctccagcagctcaggagccagtctgcacaacttagtgggtttaaaacagaccactgtgagccgacccatattcaaccctctactgtccccaaccttttcagtaccagggaacactcttgtggaagacaatttttccatggactggttggggtgcgggggttggttgtgggatggttcaagcacattacatttcttatgtactttatttttattattacattgtgatatataatgaaataattatacagctcaccataatgtagaatcagtgggagccctgggcttgttttcctgcatctagacagtcccatctgggggtgatgggagacagtgacagatcgtcgggcattagattctcgtaaggagtgtgcagcctagatcccttgcacgtgcagagttcacaacagggttcacactcatgagaatctaacgctgccgctgatctgacaggaggcggagctcaggcggtgatgcgcccgatggggagcggctgtcaatacaaagcttcactccctcacccactgctcacctcctgctgggaggcccagttcctaacagcccacaggtccacggctggggggttggggagccctgctctactcattttccaaattactttcccaaacatccacagagcgccacactgaagaacgtgactgtctcatgttctaacttgtctgaggatatttttgtccatgcttccttgaagtatttttttttttttttttttggtggatggagggagacaagaagacccagttcttggatatgaaaagaaacactgagatccacaaaactggtgccatcaggccaggcacaggggctcatgcctgtaatcccaccactttgggaggccgaggcgggcagatcacttgaggtcaggagtgagagacatggtaaaaccccatctctactaaaaataatagaacaattagccaggcgtggtggcgggcatctgtaatcccagctccggagactgaggcatgagaatcacttgaacccaggaggcagaggttgcggtgagctgagatcacacctggagtataaagtgaaactctgtcttaaaaaaacaaaaacaaaaactggtgctatcagatagtcacccatcgagatctgtcaatgaactggaggtgctgtgtgctggtgtaccggcagagcagacacagaagtgagacaattgtctggataacacaggctacaaagatcctgaaatgcagattaagtcatattttttgccaggttatttgccttaattcacacttgctttggatatgaccgctgaccatcaaaaatatgaaaaaagtttgtatatgtacaattcctatcatcagtttttaagcctataagaaccttctcaactcttctccatagcaaaaatgtcaccgactgagggtgacatgttcaaaattcaccccaaatcatttggtcttctggaggtttaagagataattaacaacaacaaaaaaccaaaaaccaaaccaaaaccaaacaaaaacaaaacaaaaccactacatttaggtgtcaaggtgtggagaactgcacaagtgtcctttaggtgcggaatcagcggggaagtcacgtttctccagggaccctttaggatctgacttaaactcagagccgaggtggccagtagcccggccttgggtttctacaatgtgcgctgatgaactgtgggtcaaatttcaccggtctgtcttctccagtaaaggactgtgcttactattcactcgtttattcaacaagtggtgacttaacgagcaatgctgaggccaggcctagtgccaggagctggggacggacccgatgggccaggcccgccttggaggagcctgcggtgccctgcatgtgggaatccggcacttattaaagaaccaaataagcgtgaagtgtgcaggaggggcagcgcaggaccaggtgggtggtcgcgcgaagtgcttttatttttctgaagatacggagcatgtttaaggctgataggaaagagcaggcctgcaggggtgagttggctgaggagggtgggtgggggacataaagctgctcatctggggggtgggttccagactcagagtcagaaggggccttagatgggaggggtggctcctccagccccttcctccattaaaaaatgtgaaaaatgatattttacaacatcattggtataaaggaatccaaatggaatgcaggctgcattcattgcttgatacccatcagtgagacactggtttttcttctgatctgcccctatgagcactgtggacagccctgtgccctgcggggccggatggagaagccccaggagctggcggaggatggcgggaactccagctgggagtgggatgacacaggaatgccggggcagcgggcagcagagcccatctgctggtgcagagtcagtgaggcctccacccagagggagggaggcaggggctgggagtttgggatgaaggtgctcactggaaatcagtggaaaagttattggtgctgaggttcagaatgagggctctgggcacctgggcaggctcgtccccaccctgtgatggagctctctccctgtcagatggatgacagtgccccctgcagaggcctgtggtcatgataagaagggacttgcatgagctcagtggtaattgccgatgcctggaggagaaaggagggtgctccgcgcatgggcagtgtgcacaattctggagagttccaactgagctgagtgatggggcactgcctgggacccctcagtctcaccagttccctgccaggcagggcctggctgtgtgacgcaggcatgggaaaggcaggccgggggcacacccaggcttagggctttgccagatggtgagacgcagagaaagagtgggggagtgctgcctgtggacagagcgactggaaccagggacccagaaccgactccacacagagggagtgggaaggactgcaggatgcccgcttctacccgagtttcagatacatgatgaacattttttttagtataagtatatcccaaatagtgcatgggacacatttaaacaatgattcactgtgtatctgaaattcagattgagctgggcatcctctatctgatctggtaactcttgaggaaaggcaggtggagggcgaccgtcatctgtgggaacattcgcaatgcagggactgagtctggaatgagaacgtggggtatttgcttgtgccgtaaaagtctggacagtttccagtcatctacggttctaaggttctcagaggaaaggaatggagaaggtgaacagtgcaggtgttcacctgtgcaggtgtcaggttggcccctcttacagcagagccattcacaggacacacaggacagggcccagcttcagccaacctgggaactcacttcagctcccagaggccagaggacgaagactgtgatggctgtgggggctgaatggtgacccctaaagggatatgtccatatcctaagccccatagctgacctccttttttcaaaagaagttctaaatcctaaatgataaatgtctttgtaagaggcagaagagaaggcccacacacagaagagaggagagagctaggaaaagacagaggcagagactggaggatgtggccacaaactgaggaatggtggagccaccagagttgcaagaggctaggagggaccctcccctaggtcccccgagggagggcggccctgcccacacctggattgaggatttctggcctctagagctatttgaaaatcaatttctgttgtcccaagccactcagcttgtggtcatctattgcaacagcccaggacagtccctgtagctgcaggcgacagtccaatgcgatggaagagggctcctcggggtgggggccacacatggacctgcgtggggctctcacactgactttctcacgctatgctcactgccattctgagagatctggcacaagccaccttgcaggaccgactggtggacaaataggggctctggacacatcccctggacagtaacactcggcacccaggatagtcacaaccagaaaatcactgaggcggtaaaaacaaatctgcgtaaaatcagtaccgtctccgttcgcggcttccttccatcccttcgcagcttccttctgaccctttgtggcttccttcaggatggtctgcttcctctttcttgttcttcttccctttcctgaagcagccgactttgcttcccctgatccacacttctccgaatgtctgtgcaggttaatctgtcggagaattgacacagaacacacaaggcgagtgagatggggcagggacccctctcaggggcctgtggggaccccacgcatggaaagaaagaaaaatcctgagttctttcgagggcaattccacacacctcgctagccctaagaagtaaataagcaacttgataagcaagaaggtaataggaggccaggcactgtgactcacgtatgtaatcccagtactttaggaggcccaggagggaggctgaggtgggaggatcgctttagccccggaggtcgaggctgcagtgagctgactgtaccactgcactccagcctgagtgacagaaaaaaaaaaaaaagaaagaaaagaaaaggtgatagaaacctaaaacaatagccaaggaagctacactcaggatgtttggggcactcgcccaggctggagtgcagtggcgccatctcggctcactgcaagctccgcctcctgggttcacgtcattctcctgcctcagcctcccaagtagctgggactacaggcacccgtcaccacgcccggctgattttttatatttttagtagagacggggtttcaccgtgttagccaggatggtctcgatctcctgatattgtgatctgcccaccttggcctcccagagtgctgggattacaggcatgagccactgcacccgccccccgtctccttttttttttttgagatgggagtctcgctctgtcacccaggctggagtgcagtggcatggtgtcagctcactgcaacctctacttcccaggttcaagcgattctcctgccttagcctcccaagtaggtgggactacaggcgagtgccaccacacccagctaatttttgttatttttagtagagacagtgttccaccatgctggccaggctggactcaaaactcctgacctcaagtgatccacctgccttggcctcccaaagtgctgagattacaggcgtgagccaccgcactggccaagataacatcctaacatccgtccctgagttgttttttagaaacctggctctttaccaaacaggtccaccggcagggagacctaagataaggaggacctgggggctgaaatctgaccactgctaaatttgttctaattttgttcttaatttcctcctgagaggcctagaggaggtcatgcctcgtgaaccagagctaatactcttttctcaaaattttaaacaaaacttctcttccttaaccaattgcaaaccagtctctgaatctacctacaacctgtaagcccttgctgcaagatatcctgcccttttagggcaaggtatcctccatgcgctgatttataattttgtctgtagcttctgcttccttggcaccctgcaaataaactcctgctgcaaactgtggtgtggatatctggtcttactgcaccaggcaagcagaccccagtttggttctataacaagagtcggcttccccaaaggcactgaaaaatgcacagttaaagagatggcctttgggaaaactgtgggtagcatgcacctttgataatcttgtgcaaaaatgatgactttttaaaggtgaccctttctgttgtgcttagctctagccaaaagctagcttgctttaagtatttttttttaataatagaaatcaatgagaagacaaaatttatttatttatttatttattttttgagacggagtcttgctctttcgtctaggctggagtgcagtggcacgatctctgctcactgcaagctccgcctcccgggttcatgccattctcctgcctcagcctcccgagtagctgggactacaggcatgtgccaccacgcccggctaattttttgtatttttcagtagagatggggtttcaccatgttagccaggatggtctcgatctcctgacctcgtgatccgcccgcctcggcctcccaaaatgctgggattacaggcgtgagccaccgcgcccggccttaaaatttatttttctagaatgtttctactctctaaagtgaagactgatgttgaaccaaaaattcaatacatcagtcaatttcataaccatcaactacataccataaagattttacttttctgttagctactctcttgaagctactgagcagaggtcatgggtggcagttatgaaactgtatacaacattcaggaataaaagccaaagacttcccctagtcaagcctactcgtgacatagtctcatctaacaaacactcaggataatcttaagtcagaaaattttcactttttgaaaaggtcctaggcaaaagtaaaaaaactggcaacaggtgttgaaatttgcaaattatgcgaaacatcccgcctgattcccattttgactttcccactgtgcttaacaggactgtctgcgtttatgatggaagaaggaagaatttacacataatgggggtgatggaacaggttgtttaaacttcttccattttatgcttagacactggggttggcaaacgacaaccagtgggtcaaatctggctgccaactgtttgtgaaagcaagttttactggaacacagccatgtctattcatttacacactgcatccacagctgcttccatgacacaagggcagactcaagaagtcgtggcagaaactgatttgcgttgccctggtgattaatgacgctacgcttactggccacctgtatgtcttctttggagaaaggtctatttagatactttaactgttttgttttgtttttttcctgagacagtctcgctctgttgcccaggctggactgtagtggcacagtctcagctcactgcaacctccacctcctgggttcaagcaattctcctgcctcagcctcctgagcagctaggattacaggcatgtgccaccatgcccagctaatttttgtatttgtagtagagatggggtttcatcattttggccaggctggtcttgaactgctgaccttgtgatccacctgcctctgcctcccaaagtgctgggattacaggtgtgaaccaccgcgcctggcctagatactttacctgtttttcattgggtatctgtctatttactgagttataagagttctttttatattttagacacaagtccaaatatgctttcttgaatcggaatttcaaaaattttatgttctgagggactgcatgaggcagacttgttcttttctctacatttttatttcttgcaccaaagagcagtttttttctctttagaattctactcgttaattttaactcttcacaatttttgcatgagcaatggtgttttgggagcactgccacagcttttatttgaaattttaaactaatagggttgacattccagaactatcccactgtgctactcagaaaaacacaactacactactgttttaagaagaaatatttttaaaaaaatagtcaacttcaggaaattcaacttttataaaacttttataaagttaggctgaagcctacatggtccaaggatctagctagccatgtgcagtggtttttaaatgtcctgaaattctttgatgctgttcctttcaaaagaaacttcattccccactcgagtgtgggtgggacttcatggttcatttcttgtgactagaatgtgccactttttttttttttttgagacagagtcttgctctgtcgcccaggctggaggccagtggcacaatctcagctcactgcaacctctgtctcctgggttcaagtgatcctcccgtcccaaccacccaagtagctgggattacaagcgtgcactaccacgcctagctattttctttttttttttttaaagtagagacagggtttcaccatgttggccaggctggtcttgagctcctggcctcaagttatccacctgccttggcctcccgaagtactgggattacaggtgtgagcccccacagctggctgttgtgccgcttttaggactagactgcaaaaggcaccatggcttcctacttgcactctctcacttgctctgagtcaggaggacactcaagcagccctgcagagaggtccctgtagcaaggaactgaggccggtgccagcagttgtgtggcggagctgtcctggaagtggatcctctggccccagtccagccttcggatgatgcagccctggcggacatcctgactgcagcctcaggagtggccctgagccaggaccacccagttcagccacttccgagttcccaacccagagaatctgtcaggtgataaatgtttgtggttttaagccactccattttgaggtaatctgtcatacagaaatagataactaatacaacacctaaaagaataaaaccataaatgtattgcttagtccagtaccaacagcactattcttttttttttaattaaaaaagttattttagagacagggtctcactctgtctttgaggccagagtgcagtggtgcgatcgtgactcactgtagcctccaactcctgggctcaagtggtcctcctgtctcagcctcctgagcagctaggcctacaggggtgcaccaccacaaccagctaatttttttggagggatgggggtctccctgtgttgcccaggctgatctcaaactcctggcctcaagtaatcctcccaccttggcctctcaagtagctgggattatagacaccaataacattattctagggacatctgaaaaaatgtgtgaaaactgcattctctctgtcaagtagcctaaatctagttcactgtttgaaaatattacactaaaaggtggggttctttggggagtctgataactccctattgtaagattttgtgtgttggattgtccttttttttttttttaggggatgaggagaccacactttcataggattcttcaagaattttgtgattttaaaaaactaataaccactttcctaaggcatgacagatgctcctgaagtcctggcaggtttctataatcgggtttaaactctcctggtgtgacactgtcctcctgagatagagggatctttccatgggggatttactgtgacttaagtaagcttacccagcgggaaaagcctttgccacacttggagcatttgtaaacagtcgggatgaaatttgcatcgtggtatttcctgaagtgagcgtttagaagttgcttctgtcggaaacatttattgcaagaaaggcaggtgaatggtttctctccagtgtgggtacgaatgtgagcggtcatatgacgttcctaagagggaaggggaagaaagcagcttgtctagttcaaagggttttctcgatattagacactgtttatcatacaataccttttatttccctccccaaagatgagtccactattaagcagaattactgcaaacacattctgaacaaggcagcattcactctcagtaagtggccgcctaggaaacaaaactcgtatgcagcagcaagtgacaaaggtcttgcagtggattccttgctggctctcctgtcctgttgggatgtgggagtacacaccgcagggcgtgaaaggatggtcctttgtcctctcattactgggagtcctccttctatacaactatttacaattacctgaatttacaaagggcaaatagaacctgcaaacttaaaaatcaaatgtcagagtttaaattcagcagacctttggggttgcaagtaccttaagtatcaacatttttccatttacttcccaatagtatcgtaacagatcttaataccgatttttttttttttttttttgagacagggtctcgctctgtcacaatcatagctcactgcaatctcaaactcctgggcccaagtgatcctcctgcctcagcctcctgagtagctgggactgtggacgcatgccactatgctcggctcagtttgtattttttgtagagacagggtctcactatgttgcccaggctggtctcaaactcctagcctcaagcaattctcctgccttagcctcccaaagtgctgggattataggtgtgagccactgtacctggcctaaatagagattttatcttagacaggagaaaataatttgggaaatcaggaaaaaaatatgtatgaagtcaagcaaaagtacacattttgttttatttaaaatgtgatgattatttggattaaatatatattcggccatttctgcattactgtcagtggcctaactgatgctctttcttctaatctttctctcacccaattcactaaacaccctcttccatgcacagctttcacctcatcaccctcctttgggacagcatctctggcgctccctgctgggagcctgactctccaggaccgcggcagccaggagcacccagcagtgctccaagcctctgcccacggccatgacctgcctggctgctctctactcccacatacctgctgtatgcctgctccagggcccctcatcctttccaagtcctatccatctttcaggaagccctcctagttcatttgaataagtatgagcctgaggcctcagaatattctttgttcaaaatctaccagaaaaactccttttcccttattcaaagcatttacagtttacagcccacacttcaaaacacacagtaagcactgattttcacctttggtaaccaatagcatgcaatactttgaagcagtgttttggttttcaaacttctactctgagggccttttatactttaaaaaattactgtggcctctgaagagcttttatgtatacaggtggcatgtattagtatttactttcttagaaagcaaacctggggaattcttaagtgttttttaaaataaaacaatttattaactcatttaaaaataaaaacaaaccaactacatattatttctgtaaaattatctatttttcaaaacaaaaataacctaatgtctgtcttaatagataaggtttccagttaaaatacaggctgcaactacttgtatataaaactatttgttgttgtctgaagttcaaatgtcactaagtgtgctgtatttttatttgctaagtctgacagctctattaaaagcattcggggccaggcgcggtggctcacgcctataatcccagcactttgggaggccgaggcgggcagatcacgaggtcaggagatcgagaccatcctggctaacatggtgaaaccccatctctactaaaaatacaaaaaataagccaggcgtggtgggggccgcctgtagtcccagctactcaggaggctgaggcaggagaatggcgtgaacccaggaggtggagtttgcagtgatagcgccactgcactctagcctgggcaacagagtgagactccgtctaaaaaataaaaaaataaaaaaagaattcagatggattcctatctctgctcttccctcagtccactggagtatgttaagtgataaagaaaatttggtctcacagacatgtagtttgaaaagagagcaacattttactagctcttccaaataactgtgggcattcttctctgctattacactaaaattcagttagtagtaatttctttttttagggtctcactcagttgtccgtgctggagtgcagtggtatgaacacagcctactgcagcctcaacctcctgggcttaagtgatcctccaaccttagcctcctgagtagctgggacagatatgcaccaccacccacagctaatttttgtatttttttgtagagacagggtctcattatgttgcccaggttggtcttgaattcctgagctcaacagttctgtccatctcggcctcccaaagtgttgggactataggtgtgagccagtgtgtctggccatggtaatttcttaccatgggttgcaatgtggaatctgaaaccgtgccaaagaacttgtgctcctctgcgacattataacctcttggtctatcttttactttgaatggatcttttacctgtgtgtgagtctgtaacatcatggattggtcatttggaaaatactagttcacttgagttatgcagatcttctaaatgctgacatatttcatcacacaatataaaagttgctttaaaaaaatcactctaatcccccccctttttttttttttgagatggagttttgctctgtttcccaggctggagtgcagtggcgcgatctcggctcactgcaacctctgcctcccaggttcaagcaattctcctgcctcagcctcctgagtagctgggactacaggcgtgtgccaccacgcccaactaatttttgtattttttaatagaaacggggtttcaccatattggccaggctggtctcaaactcctgacctcaagtgatccacatgcctcggcctcccaaagtgctgggattgcaggtgtgagccactgcacttggcctacattgttcattttttaaaaaaatgtccaccaacgcccaatgactgagtaaacagaatttgtttatcttgttcctttcttagtgaaaatgacattcactgagaaagtggctacttgagctggaaattcaaacaaacccccaggtgcttttcctccaagctttggaagacagtggaggtgcgtatgccggcttctcatctcatcacaaagattattaaaaagaaagtattccaggtaaagactgaataaagttaacaactttaactgcctcttcaagcacactgtcatgtaaaactgccctttatttttgctgccagtgtgtgaaggtgaagaataccacaaccaccaattccactgggtgtcactgccttgatccgggctaaggaccaccactactttggcaccaaaagtgcaaatgtcaatgtctcaaaagggcaaatgacacctttccattatcataacaaaggcttggctcttgtggggccctagttggtcacagggagctctggggatatgtgaacatactttaagaactgttgttttgaatgactggctcacagttgctttctggttattctgaataggctactctattaaaagcatgacttttctcagtatcttcaaggtggtagagaatcccacccagccctccattcttccatacaccactgcctctccaaattaagtaaagtacaatacctgcttgcaggcataactgcagtgtttgcacttgaacctcttctcattcttatgagttttctggtgctgaatgagggcatagcgttcatggaagacagcagaacagtagcggcatttcagctctgcagcgctgtaagcatgcaagttgcgcatatgcacacctaaaatggtcacagaacattatatacttcaagagtgttgttttctgttagcctgcttcccctctcctctaaaccggggtttctcagccttggcgctggaacatgctagttccttcctgggcagggcagggtgggctatcctgtgcattgtaggatgttaagcagcattcctggtgtctgtctaccagatgccagcagcacctctttctccccggttgtgaaagccaaaatacctctagatatcaccgcctgtcttctgggtggtaaaatcattctcagctgagaaccactgctttaaacgaacagaatgctgaaatatcattttaatactctcggtatggagttaaatgttatataaggtatgtcacactggacctaaaatgttcattgaacaaagcactttgagaactattatggggtaggtgaattttaggatgatgttaaggtggttttatataaaaagatataatatctttattttaccttaaataatccactcgttgttagaagtcagtgccctgttatttcctatgttgaaattaacctgagacacatggtaaggtctggctgggtttgctcatctaagtctaaagcatgatggtcttgtgatacttgtgtaagaagccaaatgacaatggacagctgtgtgatggagctactccaccttacccacagtgactcagacatttagagagcttgatttctcatacagtcatgggaaggaagaattaatgtgtttataaagcatcttatagggctatgtggagtgtatcacccactggcatgagatggatataaaccatgttactttgccatggtgtcaaaaaagtctagcaactggctagacttgtgccccaccaagccccactggactgtgttttgtgatgtgctggtatctacggcaacaatgacagaatggtccagatgaaaaataaaagtgaagactttgtggaacacctttcgcctttcagaaaggttttcaaaaaaattcatctcatctccagaatctctttgggcaaaagggtcaaattttttgttctgctaacatatttttgtgtatcacagtgtcatatattttggaaagagaaataagatcatggaaaagggaggcccaggaatcctgaaacaaagaagaggctcgttcactcacgcttcccacaccctccctcccattgctcaacactggctggcttccccacaggcagtatcaaatcccagctcctaggcctgctgttccaagaccctctggattccctctcccactctgtggggtgtgacagttaaaaggctcaccgtggtagatgcggattacacgttacaggcccgcctcctttcccgaagtgactgtcttaaggggaaaactgtgtcttttgaaacttctgcttccaaaacttcttaggcccacagccagggtttaacaaaagcttgctgggtgccatagatagagcactgataaataggaacccagaatccagccacctcctagcacccttggttcgtatgactcccaggcaggttactctatgtctctgatccccagtgtcctcatctgaaaaataggcccaatgtggaatgaagtaatacccatctgtgaaaggtcttatcacgtgcatacggaacaggcctgggcccggattctaaaaacatgctataaaatgcacttatgagatgcagccaccagatggtgcgacaggacttctggaagaaaattcgtcccagggccaagttcccgaagaccgggcctcccagtatcagggccagtactttgcaggtttataggaccacgctccaaagagccagcaaatgctgtagtaaaagaaagatcgctaaaccactcacgtaggtcgcttttccgtgcaatgatggtggcacaatggggacactggtatttggggacattttcgccgtgtttctgcagaatatgtattttcatggtcccgctctgggtgaagcgggtgtggcagatgtggcattcgtaaggcttctcacctgagatgcagacaacaaagtgattccccctccaggcctgatccttgccaaaggccacctgtgctgaaagtgttttttttttttgccccaagcctcctttatcaacccccttctcaccggacaacccccaattagtatgagactcccaaatcaagcccagacagcttatgtcaagtacagctgtgtccatgatggaccagagacatgacttccccgcatctggtggctacgcaagagttcaaggtggttcacatccatggggctgtacgaataaccaagaagtacacataaatgtattcttaacacaagacatcaagtacctctgttacaaaagcagcacactttatgttttgccttaaagttgaagaatgaattaaggagttgacttttatttatttttatttactttttctttttttttgagacaggttctcactctgtcacccaggctggagtgtagtggcgcaatcccggctcactgcagcctcaacctcctgggttcaagtgattctcctgcttcagcctcccaagtagctgggaccacaggtgtgcaccaccaggcccagctaatttttaaattactcgtagagacagggtctccctatgttgaccaggctggtctcaaactcctggactcaagggatcctcctgcctcagcctcccaaagtgctgggattacaggtttgagccaccatgcctggccaggagttgagttttaaatacctgaaaaatctacggaagcaaatactttgtgttttactccacacagtggggttgtggcacagtatctatgcagactctcttactgctaaataaaggtaaaagtacagatcaagattcttttatcatgaaggcacgcaaaaatccacttttacctttgaactttaattgtgccaataaaaagtaattttttaaagcttgctttaagagttaacactgtaggtatcaggccttcagcaccagagcccttacctgagtgcgttctcatgtggcgtttcagcttgtaggtatctctgctggcatagctgcactggcaacactgaaaggggcgctccccagtgtgggatcggacatggcgcttcaatttacttgcctaataaatacataaatgatgttcgttgcaatagaaactaaaaaatggcagagtcttccattaatcagcattgtaaaagagatttaaattaatcatattttaacatcagagcaccagagcatatttcactcactgaaaaaacatgaaaaagtcatcacttttgatcatctgttatgggtgattttatctcatttgatgtgtgtgtgtataagctcctttagggaaaatgagcagcagttctgagagactttcgcgttcaccttcactttaagcctacctgccaaatgccatacaagattttgttttcatttctaaggcaatatatgctcaatagttacaaaatttagattacactgtaaaagcacaaaggcaaacatttttttttccttgcataaagtgaaaatcttgaaactctagctctcgttgggtgtggtggctcacgcctgtaatcccagcactttgggaggctgagaggggtggatcacctgagctgaggagtttgagaccagcctgggcaacatagcaaaaccctgtctccaccaaaaattaaaaatgagctaggtatggtggcacacacctgtggtcccagctactcgagaggctgaggtggcaggactgtttgagcctgggaggctgaggccgcaaagagccaagatcacaccactgcactccaaccagggtaacagagtcagaccatgtctcaaaaaaaataaaaataaaaataaaaacgaaaccctagctctttaatggaggaacatctgtatgtcttgcctcatggtcacaagtcctgcagactccaccctggctggccccacagtaacagtgtgagtggaggaaggtgtccctggctattcagcattggtgccatgtgacagcaggttcctaagaagaattaagttttaagtagaagaaattaaattctaatttgagtaattatgtatcccaggcaatcagttaaatagcaaacaacataatacctcccatttgagcattcactgcctgactcgttgattgccttctagaactattcttattctgtattcgtgtatcacaggcccttatctactgctagcaggaaatgggggcatcagctacacgtggactacagacatcaggaagctgcatcagtcctgctggtgacccagggatgccacactccatctgcctccccagtaagtgatgagcgcacagaagcctaaggaacactcgagaacaaaagaaagcttagaatggaaaacaacagccaagccaaaaaatttcacttaggttttcagaagaaaagtgaatgccttcaagtatattagaaagcaaaacaaaaagaattttaaaaactgtatagcatgaaagttttgaggaggataagtggtgtgaatgagcaaagaaggccattaaaaaagactctggatgactcttaaaggtgggatgggaggacaatgggagttcaaatgcttttttttttttttttttggagacggtgtctcactctcgtccagactggagtgcgcgatttcggctcactggaacctctgcttcccaagttcaagtgattttcctgcctcagcctcctgagtagctaggactacaggcatgtgccaccacacctggctaattttttgtatttttagtagagacagggtttcaccatgttggccaggctggttttgaactcctgacctcaagcaatacgctcaccttggcctcccaaagtgctgggattgcaggcgtgagccaccgcgcccggccaattcaaaagcttttttaaaaaaaggggcacatctgcaccacagctttgatacgttcctgctgccatttttgtcacgggatgggatgagggaacaaacaagcatggcaagacttgaggagactgcaaaaatggggggctatggcagcaatagagacccctgtgctgaggctaccccccacaggctgcgtgcagaccactggcactgggggagggtctcgtggacctaggaagtttgtactaagcaccggcaggacaccaacaaaaagtccactccaggcttaggatccccaggtgactctgttccctgatccctccattttgcattctcatactacaatcacaacctttaactcagatgagaaataatttttttaaaaatagtaacagcagaaaaaagttcttggaatcaaattctgaccctaaccatgaaatttcccaatttgtgaaacccggctgcactgttactatatttaatcatcagctgttccctttaacttagttccatttgggtgtactgttgacccagtcccgaccaggctcaaaaccgggcctcagcctgtttcccagcacacagtgagaccctgacaattaactggtggaaactggtactgactagtaaaagcagtgctctgcctgtttcacgtgagtaccgccaaacctgttagaaggtacaaataaagcaaattaattaaaatgactatggcacacctgaagtttgaaaagggtggtctctctgtaattaaaaacagaaacgtctacgcttaaatcttcgagcaagctgctttgtatctaatcaagctcaaaaatttcagccaacattgagattggatctgcattctacgttagagcaaatacattttgattttgtggcccagagtactagataaaatgcagaacttttaaacaaatctgggacttatttcttgaccacagatggtttatttgtaatttgtaaacctttacatattattttcactaattagtaatcaaagaaacaaagaaatccaattttctattttaacttcataaaagagaatgcatattatttcctgcataaattttatatgaataataaaaagcctgtttgtaacagattctactgttagttacacttggagtaacttgtacagcagcctctactaagatgccatgaagcttcaagtccaagaatggctttacctccacactggcatacttgcacatggaacatttaaagggtttctcatgagtatgtttatagcgcctgtgtcggacgagttctccactggtgacaaatgccatgttgcagtcgttacacttgtagggcctggttcctgtaaaatcacatagttcatactttcaaaacaagacttaaccagaaacattccaaggaattcatagctttttaattacactcagtctcaaaaatgctttaaaaattaagaagaggctccttaaactataaataccacagatgcatgtgagaaaaatctttgtaacagtatttttaatggaaattcaagaaaaagaagacaaaactaaagtataaaatgttacacgattctactgtagaaacaggtggattcacattcttaacataagccttaacacacatcattccagagaaacagccttcccggcagttttacctgtgtgggtgttaacatggttccgcagcagagtgaccgtacggaaggttttcaggcagaggtgacacaggtgaggcttctcactggtgtgagttttcatatgacgattaaaacttgacattctagaagaggtgaacatgcagacatcacagtggaaggttccttttgctcctataggcaggaaatagtttatgtatttgttagaggttcaaattccatttaaatacttgaaagtaaatcagcacatcgtcctttcaactaacgtgggaactgaacaatagcacatgctatttatatccacaagctgatcgaagcaattcaggacaccatgttcctggataatgaacaatgcattttcgctgtttcaagatgggccgatgtctgtttctgggcacagagtggactaggtactctgctcatccttcttgctgagaaaaacaatgctagggaggagatgcctgaacatttcagaatgtcttgtagacctaaggagagatgagaaaaggcacaccgcctacctgaagtggggcgcccaagaaatgtggccctgcattctctgtagggtgaactaaagataacccgccccatctctgcatccttctctctagccaggggactgcaagaaaaaccatctagaatggtgccatccaaaaccacagccataagtcatgtgtgactcttaaatttggacttaaactaattaaaattaaatataattgaacatttagttcctctgttgtaagccacatttcaactgcccaaaggccacatggagatagtggccaccgtactgaacagggcagataaagaccatttccatcagcaaaagaagttctcttggatgatgctggtctagcactgatggagaggtgaaaacatttgccctaagaagatggctccaaagagggaaggtggccccagtgagcatgtcctgggtggttctaacagtaacccttgggggatctggtttaagacagtttttgaccatcactgcctggcagaaattaatatataccatcccttgaagaacccactttcaccccaggcttcaagggattcccacagataacagtaaaaagaaccaatcagctcacagtgataaataagatgccagtgcaagggcagcggaaacaaacagaagactcagacctacaaagacttcagatgttggaatcatcaaatacagaatatagctgagttgttattctcaaaatccatccctccataaaagcaatgaaaacaactggcaaaaaaatgtcacaagcaactttttcaggacactggaaactaactggaagcttccagcaaccaggggaaacaatttaaaaaatctagctgattctcagtaaaaaagagagcttggtggaattctaacttattccggttccattctctgctccctagctcaggggtggccttgaaaataacaatccaagctatattaacagaatgatgaaaaaaacaacaacacaagatcatctcaatagatgcagaaaaagcatttcataaatccaacaccgttttcttgataaaatactcaacaaacttggaatagaaggtttatgggttgagttgtgacccctgcaaaaatacatgaagtcctcatgccagatacctgtgaatgtgatcttatgtgcagaaagggtctttgcagatgcaatcaagctaagctgaggtcatgctggatgaaggtgggtcataagccagtatgactggtgtccttataagaagaggaaaagagatgtagagacatacaggaataattccatgtgataacagaggcagagattggaggagtaatgcatctgcaagccaatgaatggcacgactgctggcaatatcagaagctaagagaaaggcatgaaatatattctccccgacagccttgcaagagagcatggctttgccaacacctcaatttcacactcgtagcttccacaactgtgagaggtatgtttctgttgtttgaagccactcagtttgtggcactttgtcatggcgtccctgggaagctaacacagtgccagttaaaaatgggccaaagatttgaatagccattttttccaaagaagatacgtaagtgaccaatgaaaacatgaggagatagtcaacacctttcgtcattagagaaatggaaaccaaaactacaacgagatacctcttcacacctgctaggatggctataattaaacaataacaacaaatggaaaacaagcgttggtgaggatgtggagaaactggaagcaacacacactgctggtgcaaattcaaattggtgcagctgctatggaaaatagtgtggtagctcctcaaaaaattaaacatagagtaaccacaccatccagcaattccactcctaagtatatacgcaaaaggactggaaacaggtgctcaaacaaaaaacttgtacacagatggtcataagaacaccattcacacttgctgaaaggtggacacaattgcagtgtgcatcagtgaatgaagggataaataaaatgtgctatacccatacagggattattacttagccattaaaaacgaatgaagcgctgacacatactacaataccaacaaaccctgcaaacatgatgctaagctcaagaatctagacacgaaaggcacatggtatacatatatgattcaacttctggaaaatgtccagaacaggaaaatctacggaaacaaaaagtaaattagtggtagccaggggctaggaggaacagagtaggaagtgactgcctaatcggtacaggcctcttattggggtgataaaaatattctggaatttagacagtgttgatgggtctacaaatttgaatatatcaaaaacctaaaaatgagctagaaattgtaaaacttggggtgcaaagctcttgatttaaacatatgagaaactactatgtaccaaaaggctgcaaactcaaccacctatggaaggcagaggcaagaaacctaagtgaagggccctgaccacatgtaagaatggggtggtggtggcagtgtttggttggcattctccttttctaaactgagtcaccttccaatcccaggcacctgatgccaggaggaaggaaaactgtgccaagtgttgccagatataatttaaaagagctagaaattgaaattttgggggtgaaatatgttgatttaaataagtgagaaactaatatttttaaaaaataagccaaacaaattattttcataggacaaattcatcctgtgggctgctggaatgaaatctcagtttaatatggctttaatattgcttcagggtcttcctaatctggacccatccacctctctgagcacccacccagctctacagacacagtagagctctccaccctcagatacaaagtaaatacttccagagctacacgcccagaccacttcctagtacttggaatcctgatccccatcttagtggcttctttgtcctggactcacctaaatatcacctcccttagaaggcaccctctacggcttcctgaaggaggaatcactccttctcttggccctgaagcacacgaggcctcaccacctgtcctgtaatgacttgtcccccatatccctctggggctgcaaactaggcagcagagaccagggcttggtcttctatgcttacgtgcacaaggctttgtgggaacatttttactgtgctttcaaaacgtttgtgtgtaaagtgcaaaacccttctggatttgattcacaatacagaacattagtttaaaatttctcccatttcctgacattttgaaagtaaaagtcaaccacttaaaacttcaattaccatcacctgcccataaagaaaaacagcagcccagttttagggagtgtattctatgagatgaactggcctaccctttgtctttctttgattttttgtagatttggccttttcagcatctgcttgaccagctgtaggttgatcctcttgttcttccacatttgaatttgaaactgtgagaacaatttcgtcacttctttcatctcctgacattgtttccacaaaaaagagctgctcctttgttctttcagccaataactggttcttctcctgctcttcctcgagctaataaacaacaaatattcaaatatgatactattgatttcagtataattagacttttgcctggatgaagcacagaatacaaaaagaaaagccaaagtggaagattatgcatcacaatgttaattatttcgcatcagggttgtggcagtgaaacttaacacttttttttaaaacataatgcgccttacactattccaattagcaccacttttaaaactcttttttaaaaaagaacctaagaactctcaagattttcctgggaagtatttgtactgtctttaatttgcaactgcaaaataccttgtccagacataatattgcataaaagccgacttgaattttttctttttcatgtaaggggttgtttattaaaaccagctgtaccttgatcagtccagtagtttcagccaggctcaccgctaacttactgtcttcactggccaccatcacattctcctctagagcgtggaactgcaacacctccatctcttgcggggagtacagctcttgctggatactaatggccacacactgctgcaggctctgccggggcccttcctcaagccacagcaacccagggccaggctgttgcaccaccacctgcaccccttcttgctgctgtatgctcagcaagctcatatcctgcaactccacagcttcagaagtgaagtgcaccgtctgcagggtcaggatgtacttctcgctctcctccgagggggccagcaccagctccacttcttcctccaggacgctgtcctggaaggccccagaggtacgctcggcctccaactcactagggctccgatggtctttctctctgcacactccgtctttttcctcctccttcaggcctttttccggcatcaactcgagttctttgatcttggtgaattgctcagaaaggacagagatctcagtggctgccataatgacttggcctgtttgaaaaataagcaagcggtttccataggggggagaagggggtggtatgaggagggatgcggggggtgctggaacctagcaggctttggagttgaaacaaggtctggcctcaaaaggttttggacttagtagggtcagaacaatgctgatctggcttgggtctaggagggggtcaaggctaagcaggatttaggctaaagcaggattttgtacaaaaccctagaacgaacaggtttgggcctcagcaggcttagggccagcacacatcctgcgcctggcaaggttccgcctgagcacactctggcccagtgcatatcctgggcctagcaaggttaggcctgagccggttcagtcagtgaacatcctgggcctagtaaggtttgggcccagcaggctctcggccagtgcatatcctgggcctagcaagtttcaggtccaagcaggccccgggccagtgcacacccggcgcccagcgaggttcgggcccgagcaggcattcccctcgtgcacggttctagacctagcaccctcagagccaggcaggctttgggcctagtggcctcgagcccacccagacttggccaagcagccctcggccagaccaagcacactccctcggaggcctggcagggcccctgctttaccctgccccccacgccccgccccgacccgaccctcccaggcagcccctcagcgtctgccgcccgcccttgggcctttccggccagcccctccctccgcccacgcccagaacagcccatgctcttggaggagagcaggtgggcttgaccgggactggcccctcaccgcggaaggcgtggccggaatgctcggcccactccgtctttggcttgtgggctctgcctcgtgcaccgcgtgctgcagcccacagccggccgccgccgggctggcgcgagagtggagggtggcagtgcgcaggcgcggagcggaaaagagggggcgtgaagggggcggagccaggcagggttgggggagggggtgatgtactgtgggggcaggggggaaggggagtagggagggggagggggagcacggatgaggaggaccccagagggggcactggtggacctgggggggtggatgaggaggggaggagggtcccatacagggcactgggagacctggggtgggggtggataaggagaggaggagagcctgcagggcactggaagactgggtagtgggggagcgcctaaggaggggaggagggtcctgcaggggcacggaaataccttggggttgaagtggatgaggaagggaggagggccccgcagggggcgctgggagacccgggggggaagtaaggagggcacgagggcctgcagggggcctgggagatctgagggggaatggataaggaggggaggagggcccacaggaggcactgagatactggggggaggggtggaatgagggggggaggggtggaatgaggcggggaggatagccctgcaggggggctgggagacctgaggggggtggtgggtaatggataaggaggggaggggggcctgcagggggcctgtgacacctaggggaggggaatggataaggagggtaggagggccaacaggaggcactgagataccagggggaggggtggaatgaggaggggagagccctgcaggggggcggggagacctgaggtgagggtaatggataaggaggggaggagggtctgcaggggttcttgggagacctgggggatgaataggagaggacaaggggaggagggtctgcagggggccctgggagccctgcggggggcgaggggtgggggaatggataaggaggggaggagggcctgcaaggggtgctgggagacttgggggaggggaatggataaggaggggaggagggcctgcaaggggtgctgggagacctgggggaggggaatggataaggagaggaggagggcccgcaggaggcactgagagactggggggaggggtggaatgaggaggggaggagagccctgcagggggcgctgggataccttgtgggggaatggataaggaggggagggggtcctgcagggggcgctgggagacctaggggaggggaatggataagggtgggaggagggcccgcaggaggcactgagatactggggggaggggtggaatgaggaggggaggagagccctgtagggggcgctgggagaccttggggggaatggataaggaggggaagagggccctcagggggcgctgggagacctgggggggaaatggataaggaggggaggatggccgcaaggggcactgggagacgctggcggggaatggataaggagtggaggggggcctgcaaggggcgctgggagacctggaggggaaaggataaggagggaggagggcctggagagggcgctgggagacttgggcgggggtggagggaatggataaggaggggagaagggcctgcagggggcactgagacctggtggggaatggataaggagggaggagggcctgcagggggcgctggggaacctggggggcttggataagaaggggaggagggcctgcagggggcgctgggagacctaggcggggcaggggtggggaatgggtaaggagggaagaagggccttgcagggggcgctgggagacctggggtcggggggaggataaggaggggcaatgggagaggatggggaatggggtgcttagagacttgggtgggaaatggacgcagcagggactgggcggggagagaccttacaagggttccaggagatgggttggggtgggctggacagggcagagtggagggtgaggagggccctctgtgagccacagagacctgagcaggagctaggtgggggctgggaatgtgcaggaaaggagacgtggaaggagggggagatagggcggcaggggtgatggagattgacagggaccccagacatgggggtagggaaatggggatggaaataaatggaaaaaaagaggcttcgtggtgggaaagaggaggaactccgagggctccggggcactgaggtgtgcagagttgccgggtcctgagtaccctcgagggagcagagggagctcgaggaacgaggaagagaggggacgacgagggcaaagaagggagaacgtaggcgggtgtggaggaggatgagcgtccgagggagaagacggaggagttgagcagagaaagggcaggaatgtgggggctggaaagggtgaggaggcagccgatggagcaggggtgcatcggagttcatgggtacttcccaggagctcatttaaggcaggtgggagggcgggggacgtggaggggcggccacactgtgaacggactgaagcccacttaactgttcactctaaagtggttcagttcgttacgtgtgttttcacttcaatcaattgcttttaatggaaattaatcatattgatggtctccagaagaagttgggttgatacctgcaaccagattttaaaaatgcaaatttggagccaatgagtgaatgaaataatttgtacctcactgattcttttaaggcatagcttacaacgttccagaaactgttctatttgttttcacttttgtttcaaaatcttaatggcattttgtttgctgattgtgaataaatatttgtatgctgcgaaaagcaaatccaaaaccaacagctcaaaggagaaagtgtggcaaacaggagattggagattggaccccaaaactcctggagtgacgaaaattgacctggatgaagaaatggctttctcttggccttcttttgtttaaacatatcttccagtcctggggatggatttccctcccatccatagccagagaactttctgtatccatcaaagtgctttctatgtttgcccgctctccacagctccctctttgtcattcgcgaatagtatataatcaaatattgttttcattttcaataatataaaagatagaactaaattcagctttgaaagacacccatgtaccagtgggtactggtacacttgccagtgactttcttcgctccctagtttctgcgtggtgtctggggtttccgtcacagtatatgtactatacaaagaaaataaatatttgaaggtcactgggaaagtagtatgctataatgacttactttaaatcatttaaatgagtttttctgcttgagtaatcagcacctatttagtgcctccttgagtaattttgcgtgatggctgtgacatgctgctaggaagtttttcagagtttgtattatagaatcatgtttagaaaatttcaaataccaatttaaaaggcatgttttaaaaggagatataaagccagtgggaggagggatagagaaaggggaaactgagttaaatttgaaggggacaaaggggcttaaaaagagaaatagatggaaagggagggatgaggaggaggagagagggccaagcaggcaggggaggcaggcctgcagttgctaaactttgctccttccccgcgttcttggataatatttgtggggaggcactccaagccagacctgctggatttcctgctcgtaggcctgtgcagcccaggaaactgttcagaaaagtaggaggtaggatcctatttgtaccctgagtgtgtggagcagtttctaccaggtaaaccttccatccctgttttttaggggatcaagatagactgcaaggcaagatgcttgcatttagtctcagatgaaaagaacagtggactcccgggccctcatcctccttgtcaagtctcaattcctcagatgggcttcagttctctctttaactaatgctgtgcacctgtccagccttttcatctacagagttctgtctctgctccatccagacccatctcctccttatccccaggggctgtgctagaagtggatgtaaggggcagagtgtgtcttgttgcttgcatccaaaacctgctgagacccaggccctcctcgtagcaaatgccattcggtctcttacagatgcccaggtgtggtgacgggccagccatgggttcccccagtgcctgctgtggagcttggtcacttgcatcctccgggtaacaatgatatttattatgccttttgtacccgatgtttggggatttccatgtggtggacaggtgagctttgctctcccagctgccaactggctgtagtgcacatgttttgcaggtggtattgcttcgtggtgggtccacactatgagcttatcaggcaatgtgctcaaaggaaaggaaggccttgcgaagtatgtggcacaggtaggggctatacgcatattactgtgtccccccaaattcatatgttgaagtcccaacccccagtacctgggggtacaaaatgtcacgatatttagaggtaggacctttaaagaggtaattcagtttgaacaaaggccacggggggcagtaggggtgggggagaactaagccacctgactgtgttagggcctccaaagaagtgattattaaaatgatggcgagaggatggggtcccaagcctacctggctgaggtccttataagaagagaagacaccagagaaggacacacacagaggaaaggctgcgtgagagcagcaagaagatggttttgtgtgagccaagaagggggcctcgggagaaccaaacttgccaacaccttgctcttgtacttccagcctccagaactatgagaaataaatgtctgttttcttagccactcagtctgtggtgttttgttacggcagctctagcacaccagtgcaggtacacaccaggagaggctcacaccagtgcaagctcacaccattgcaggctcatatcagtgcaggcacacaccaggacaggctcaaaccaatgcaggcacacaccaatgcaggctcacaccaatgcaggcttacaccagtgcaggcacacaccagtgcaggctcacaccaatgcaggctcacaccatgcaaatgggaccgagtgtgggaggctgtgctactgcatggttgctgaaagcaaatgttggaaaacatattccacttagccctttgggctaagaattatccccagcacatgtgcttgactgggtgggcatggggacagatgagctctagagcattatttggaactggcatagattcagatagagatggacaaatcagaaatgtaaaaatattttgaaaaaaattctatgaggcagcaatggacgagacaggccattgagtgctgtcattgtctttaaaaaatactatgttcactgctttcaaagtaagtgtcatgaggtttattacttagtggttctctggctcccctaagttgactgtaaaatctttatgaggcacttggtaagcacataagtatttgaagtacccaagggataaaagagctcggtagtgaaatggtgagtgaaggctggaattgccctaaagtctgggtaggaagggggcctccagctgagtatgccaagcaagtaacatgaattatctctcaaatcttctagaaagccctatgagggggcagtatcataatacccttttcacagagaaagaaatggaaaggttaagaaacttgctcaaggccaggcacggtggttcacacctgcaatcccagtgctttgggaggctgaggccagaggatcactcgaggacaggagtttgagaccagcctgggcaacatagtgagactcagtttctacaaaaacaaaaaaaccaaaaaattaaaaaataaaaacttgctgaagtggtggaaacagtgattcagggatctttgtcttaaatactttgtaatgtgttatttattatgcttcttgttaatttctacatgggaaattatatatatgtttatgtttttaaatatatattatatatacttatatattaaatacgtatttctacatatgtttcccatatatgtgctatgtaatatatatggtaagaaagctcaacatgggtaaggatctttgtgagttttgttaactgttgtatccaaagtgcctgggacaggacccttgacaacaatttgtggaataactgagtgttggagtccattggccttcgaccactcttttttacagcccctctggcatacatgaagggtgaatctgagttttatatcccacagccttacacaaataaatgtcatgattgcgttttctcttgttgttctgcagtggtatttacctggacagtttaatgatgtctctgacctcttcattttaagaaacctttcaagaactttttacttcattcaacagttgtctattcatgccataggtatttataatgaactgtgatatctatattgtggagaaacggggtgctcagaaagcttttctttttctttttcttttcttttcttttttttttttattctgagatggagtctcactctgtcacctaggctggagtgcagtggcatgatcttggctcactgcaacctccgcctcctggtttcaagtgattctcctgcctcagcctcctaagtagctgggattacaggtgcacgccaccatgcccggctaatttttgtatttttagtagagatgtggggtctcatcatgttggccaggctggtctcgaactcctgacctcaagtgatccacccaccttggcctcccaaagtgctgggattacaggcatgagccaccacacccagcccagaagtcttttctgaaatgtaatctggtaaccagaatttccagctttggcactttatgtgtcagttcccctagatatactatggacctgcattaaggcaaagagaatttaacacataccaggccaggaaataggtcttagggttaagatttattagtactgcctcaactgcatgcattagtataatcagctcaattctcaggaaaaacagctgggagtgggttgctaccttgtcaaatggcagaactagagggtagacaccaagtttttcttctgcacagttgattcttctgtatttatttattatcactctgaagcctgaccagcagctggaatgtaaactgttatttcatccacgcttacgtggtgcctggctcctcttagtgttataaagataatttgtaccaaaaaagtacataaacagtttagttccctttcacctgatttcaaccaatgaatggcaaaggagtgtccatttaagagcatgtcagttaacctgttgggcaaatgttgtttatatacagagcactatactttgaactttgatatgaacacagagagggtgtacccttattgaacaagcagttcagctttgctcatggaattggccacagaggtgaggagttttgggacacatgaagccccagagagaatttttaagactgtttgtaatgtttgtgaagaggaagaggtggagtaaagaatgggaattcgactgtacaagtgcaccaggtgttctggaactccccagaaatttatcattaaaacctcttccttctcctacttatccatgaagaagcatttggtaaataagcaaataaaagctttattaccttcctaccttccctccttggattgcaggtgtgagccaccctgcctggccttgagcaagcttcttaaactttctttctccatgaaaaggggattatgatactgccccccataggactttctggaacatttgagaagtaactcatgtctcatgcttagcctactcagctggaggtcccctttctgcccacattaaatggggtctgaaagcaagcatcttgggggagaagaatctggaaagtgcattttaatccataaatggtcatttgggtggcagatggtgaaggggctgatgtgaaggacgactttttctcctttgcataattgctttgaaaagtacacattaatagtgcaaagagaaaggtaagaatcttgaggtgggaagattatcctggattcttcaggtgggcctaatgtcatcccaagggttgataaaagggaggcaggagaatccgagtcagaaggagatgtgaaaaggaagcagagagacagagattagaagatcagaggcagctggctttgagatggaggaagggaccacaagccgaggaatggtggtggcctctagaagctggaaaaggcaaagaaagagattttcccctagagcctccaaaagggacacagctctgctgacccattttagacttctgacctccagaactttaagccactcagtctgtggtcatttattacagcagctggggaaactcatacaggagtttcctgcatccaggatgccccacacctctgcttctccctcctcatggctaccccctcatctcggtgctgcttctggtttctcctcctggcctttcaagaagagatgggggaacccaggcacagcccttggatctttcctctccccacactctcccttggggatcttatccagtttcgacgttttcagtgaactgtgtatgcatgatggcttcccgtctccaatggggaccgcttccctgcctccagaccctgggacccatctgccccccatcatccctgtcaaaatgtctaatgggcaaacgtagcttgtccaaggcagaacacttgctccttccacctgaatgctgttttacctagtcttcccatcacagctaatggggatccttctagatgctctggctgaacaccttagaggttcctctttctctcacagatgaatctattccatcagcaaatgcatctacctcaaaagtgtcttcagaatctggccacctctccttacctcctggcccccaccctgatccgtctatcatgccactactccagatgccaccactccaaatgccaccactccaaacgccaccaggcccaatgccaccacacccaagcaggacccttccacggtgcccttctcctctcagacatcacagtgggccaccctatcttccacctgctcccaccttgtggcctcttgctgttgctcagacaccccaagctggctgataccccagggacttggcatttgatgttccttctgtggggatgctcttccccccagtagcaatacttgttcttccactttctgcaagtctttgttcaactgctctgtctctgaggccttcccagtcctccctattaaaaattacaaccacaggaggattgcttgagcccaggaggtcgaggctgcagtgagctgtgattgtgccactgaactctggtctgggcaagagaatgagaccctgtcttaaaaaaaaaaagaaaaaattgcaaccccagttttccttgtctcctttatttttcccaggattaaaagttgctggggccaggcacagtggctcacttctgtaatcccagcactttgggaggctgaggtgggcggatcacttgagcccatgagttgaccatcctgggtaacatagcaaaactccatctctaccaaaaaaaaaaaaaggaaaaattagctgggtgtagtgatgcatgacagtgttcaagttactcgggaggctgatgtgggaggatggcttgagcccaggaggcagaggctgcaccgaaccacgatgacaccactgcattccaacctcggtgaaagagtaagaccttgtctcaaaaaaaaaaaaaaaaaaaaaaaaaagagttgctggtatctcctccaaaaattgggtgctggtggtctgctatggatacatgtaattaaaatgtacaatgtgcctaggacaaggtgagggttctttctgctttggttctctccccaataccagatcagtgcacgccacatagcagtcaatcaacagatgtctgttgaatgaatgaacctgaacgtataattgtgcaataagcttacctggttctaagagctgagtgttcaaaataaatttgcagtgggtttggtttatctctaagattagttgtctatatttaagtttaacataatatgcaccttagcacttctttaacatctctgtttatagaacttataaaggctgtttactacaataaaacaatataaaacagaatccccaaactgaagctgaaaatatattcacagtttacctttcctgctctaattacctctggcttcttcttgatacaggttccaaaacatattttctccagaattaaaattcagaataattgccccggacagggaagggacaattttcatttggaacaagggctacatttaggtcgataagagaactcatgggaagagactgctttgtcttccatacgctgaggggctcctcctcaattctgggtcttcagggctgccctggggagaggctgaccaagtatctgcaaagcaaaggaaggaaagaaggacagagcaggttgtcagtgaacaagcagcccaccatgggtcagagggaggctggagaaggctgataaagctggactcccaaagggtgcggctccagccagaaacacactctcagagccagggaccaggggagaggacgttgtttggtgcagcttgccctattcttctcttgacagcagaactgtcctgattcaggaaatcaccttgacagtttatctgagggtggaaggaaagaccccgatcaagacacgaagggagaaagccaaaagactccatgttagaaagggagaactcctcacttttactttttgtttttttgtgtgtatgatttcaaaggggtgggacatgaaaagaacagagagaaagtggggaaagtggataaccaaaccgtcctgcgaaatggccgaaatattgtttaaagatgtatcttactaaaggactggttgtgcgtgcctccttcaagccgtcagcctgctgtggggcactctcaaaagccttggggaatggtttcttgtgtgtttgcttgtggtgcggtgtagcaaagaggctggttcctgacagagcaggagcactgacatctcggacaaacaccgccattttaaaatccagctccttttctagcctcatgcatttcaaggaaatcacttcttttctaactacaagcagccggaaagagcagacagtaaaacacagagaagacagcccccgcccagaggggaggtgggggaaactctcttgggtaattgccaaacttcaccctcataccatgggccccagtaaaacagtgggccttaataagcacactcctttcccttcaggtgcactaagatagggaatgtaaaagcagactcagggagtatgcctgcagctgcagaaagatgtatgggaacagacacacaactctccctcccagataagcacaacaaagagacacagaaggagtccaagcctctgataaactctcccaccctaaatccttaaaaactcttagtctgtaagaaagtgtgcctctgacctaatgtggccagatgtccctctcaggtttgttttctctaaaataatcctgtcttgaccatcaggctacctttcatgtttctttcctctttctttaattcttacagttccctgtccataggagcacgtgcagggcaggacagcatcgtgggaaggggagggtgatcagcacccagaatcaacccatagtggggagcttgggcacaatatctaccactgggattttgcttgtgtttttccaaaaaaactttttgttttgaaaatagttatagagtcacaggatattgcaaaaaaaaaaaaagaaaaaagagtatgcagggaagttccatgtatccttccctcaatttctcctaatgggcacttcttatgtgttattatacaatatcaaagccaggaaactgacattggcacaatccagagtttgtttagactttcaccaattttccctgcacacatttgtgtgtgtgtgtgtggtgtctatcacatgtgaaaccaccacaatcaggatgcaaaacagccaatcaccacacggatcccttaagctacccatttatagtcacatccaccctcttccctcaccccacccagatgactgtaagaatttaacccctttgggaactggcagaagtcttggaaaggacattggaatattccacaaggctcgtatggaaggttcatgcctatcttatctggatatgaagggccatctaggttgctgtactgtaatgctggaactatgttgatgatactgaaaagaacattcattgattttaatcctgaatagctcacactccaaagtcctctcatttcacaaaaacagtggtgcccaacccctttctgcattggtagacggtctctggtgaggggcaggatggtgcacaggagccatcctgaggctgggtccttgagcatgaggggtatccatggatagggagaagaaggcatcagggaggtggtgaagcatgggaggggttcatctttttcagcagccccaaatcctactcagtgcagtggcactgattgtgtaaatgagacatcacaggttcctacattatgaataaatgatatattttaaaacctaggacaaaggttacagagtgatttgcctgcaggaaccaggcaagttaatgactttggcagctggagagggacaggtgtcctctgtcccaggtaagttctcctgattttcaaacagtgacaattaattaaaagaaatttcaaattctcccgtcaaccagacaaaatatatgcatgaactagttttggtcactgccagctggtgacctttatcctggatatttcttcacaggttctcttccttccttccttccttccttccttccttccttccttccttccttccttcctttctttctctctctttttctttctttctctctctttctttttccttcttcctatctctctctctctctcgctttcatttttttaagtcacagaacaagaagacacagaaggaagaaatcatcctgaaagtacttgtaagcactttactaacccattaagtcattgcttttctgaaaggagagctctggaaatgataataatgaatatttgcataatgctctaaggcttaccaaagtcatgttggaatacaccgccttgattttcctcctagggaggaatggatagtttgtctaaggcatggatagtttgtctaaggtctcaaggcagggagctggatgatgtaaccaggactggcacccaaaactgacttcacatcccatgctctatttcaatcccatacccaatcctcttttcttttggctccctctccccaaaccagtgtgcctacagcagagctcagttttctttgccaggcatttctgacccttctcaattggccccaagctggagaattcagctgccaccaccccaccaactatgcccactctcccaagtgagtgtggagttgaagacatgaaccagcaactcaccctcggtcagtttcagatacatgttcttcttagggtgagtcaatctgaggggttcagcactgtcctcaagtcttagccccgtatcagtttgagctcccctggaagcagcaccgagagtccagggcttgggtgcaggtagtttatttggagaggattccagaaggaagtgagggagcagggaaatgacacggggaagaaggaaatccagcataagggcaaattattgaggcctctgctgtagtccatggatgcttgaatgccagaaaagcttccagaatgcttcccagattgcctgccagaaggactgtgggcaaggagtgttcgcccaccccctctcgtgcttgcagtcaagggatgctcttggggtatccccccactttctatgtttgcacatggattaaaggggacacccactctgaggaaggcccttaggcagagaaggataccctgggctccacattggagcctggggagcctgaacacacacggagctgtcaccacaggtacgtacaaaatcagggtgtgagggcaccttaggggtcttgccagagctcccagcgacatgacaattacttccatggtgccagccagagaaatagggtctgtttccaatacagaggagcagctggctgtgctggacctgttgtgttgaaactgagaggttattgcagctttttgaggaattttcatgtagaatttagaccatatgtaattttgactgtgttcagaacctaattcccataggaaattttatctcacctctttcaaacacaccttattatagacatccgccctaacacacacacattcacagatggagaaacacacacactgagacacacacacacacacacacacacacacacacactgacacacgtttcctccccatgctgttttttcacttgcccctctctttatctgaatctaatccaagcatcctgcatgatcccttcaaatctcccttcccctgtatctccctgggtcccactggccacttctgagccccttctcctctctcctccctgtgttcagagccttgatgagattggggaagagacagaggccagctcccatagagctgtgtagacagaccctggtaaggagtttgactctatttatgttccccaggaagccattggagggtttaagccagggaatgacaagaagccataaaccatttatatattttttatttatttattttttgagacagagtcttaaactgtcacccaggctggagtgcagtggcacaagctcagctcactgcagcctccacctccctggttcaagcgattctcctggctcagcccccgagtagctgggattacaggtgcacaccaccacgcctggctaatttttgtatttttagtagagacagggtttcaccatgttggccaggctggtctcgcactcctgacctcaagggatccacctgcctcggcctcccaaagtgctggaattacagtagtgagccattgtgactgactgaaaccatttatattttagaacattcttttcttgttctttcttgtcttgtctccagagtacctaggatggtgctttgactgcatcattatcgttgtgatctttgcagctggaacgtctatggtgtcttcatgtcggggcaggacagacatcgatcgaggtgtccttgtgctgagggtgttgctagcatgtgctttactcagtgagcagcagtgactcagcacagggcaggccggccgccgtctgcgtcaggaggctgtaactattttcttacagctataaaggtcacaaacatgaccgagctgatccccatctcgaggcctgactgacacaaacattgttatgactgaaacatttttcttatcaggttattcttaacggagatgcccacttgggacctgtttagtctttattgttttaaatagcctgggctgaagcataagggaattagtctttggtttggtgaccttgaaaatttgatctagaaggaggatgaggtgctggctccttctcagatagcatcgttttacccgtgctcaccatgtcggtcacgtgcaccagctcgccagtggctccttcggcctggtgcctccttcccttcctgcgacactgctccctgaactgcagcctccccagcctcagccttccctgagctgcagcctccccagcctcagccttccttatgaacactcagctctggcccacttgaggaggagatcttccctgagatgtaaacgtggtctgctccttctcatccaaactgcacaaagtaactgctttctaaaatactcctcttccccagacacgatttctatcacaatcccatgttctagatctttcctatctgctttcttgttgatgtgtttgcctgtcagttgtttgttcccccttagcatgcagaccccaggaaagcagggccctgtctgtcttgctctccattttcctacagagctttgagcagtgtctggaactcatctactgcaaggatgtagaaagtccaaatgccacacacacgtctgagtcttgagttcctactgtgacctggagccggggcactgctggtgtttctgaccttgacaaccacagacacagcacacataactccctaacctcagtctcctcagtcatcatccccatgcgagcgtttggctcgcgtggactccatggcactgggcattccaggacctcatgcacaggcacgaggcggagggctctgggctccgtggttaatgtgtaccaacgtactttttatctatagctggctttgccaccctaggcctgctttcttcccaagactttcccctggcctctttccagcaatctgtccgggagttatagactaagctacccttcggcaattagactggacttcagtcgtttttgaaagatgaatttagaggtaattttctaattactagcagttgtcaaataaactgagacggaagactgctgagtctttgcctgggcagaaatgagccctggctacagcaggagctggtcctgtgccttggtgatgaatgcagggagacaagcagcttagaaaccaattaactttctgcttcttttgctaatgtggggacagtgaggggaagagtttggctgcttgagaatggagttcaaacagggccagctgtggaagttaagctagcagaactgatgaaaggaacacgcttcaaggacgtctgcgttcttagcaatatcaaaatgttcatcttcatttgatggaacacttctgagtctgaattgtcagtacaaacgttaaagatgtaatagctattgacgcctattctagataataatgcctaaagatatcactgggacattttttcatgggaactttcaactgtaagtgaaagttttcctttcagttgctatctgcaaaaatgtcaaacttatacacagtaatatttataaggtggcttttgtgttttcttctgcaattgtgtgacattttgcttggttaagtgttgcatcttgtcatggtttgatgtcacgtggcaaccaatgtcacagaaggcctgggggtcacctgggagctgttgcttgggcttggggtctggtttgcagacttggaggccaggaacctggtgctgtcaggaccctatggcagagccagacagactcagaagcactagtgtatcaatcagggggccaatgtcttagttcacatcaaaagcaccacttttctggggagacagaccccaaatctgccacccaagttgccccactccttgcagctactgttagagacagtcatgacaggttagagacagccatgctggggtggaaaggtagagctggtatagaagacttgtcccagttccgctaatgaccttggagaagcctcaaccttcctgagcctcagtttcctcatgtgtaaaatggtgatccagtactcctatgacaggacttgttggaaagctaaaaggagaacacatatgtaaactgctgggtccaggagtaagcactgaatcatttaattgggacaggcagatgcagagtacagactggagccagtgtgtggattcctgatccaatcgcatggcctgaaataaactcctgtatatttctaagatttgggatctacaaactaaattgggatcagaatgttatctacttcataggctcgtcgctgttgttgtatcaaataagatactctatagaaagcacatagcatgatgatcatggtacccagacacagtaagggctcaaatgaatgggagctctcattgttattgggaagattaatagttctgatggtagaatagtagcagctgttgtggcaccaccagcaacaaatacaagcagccaggaggtgcaggtcattcggcgactataaaatcggaacagaggtgaactgtgtagaaggcttctcagccctggcactactgatgtttggggctagacagattgctctcatgcactgtagggtgtttagaagcatctctggcctctactcgctaggtgccaatagcaccacccagttgtgacaaccaaagacgtctctggacactgccattgtctctgggctgggggcagaatcatcccagctgagaatgtctaggggaatatgtcaccgagatgacggggaagcctgtggtcctccaaaacttgccccggtgcctgcacctgcacacactcctacctgcccaatgctttgcttcagttctctttcctagatttagtccattagatgacaaagactgagtggccactatgaacaagcacctgggcataatctgtgggagaacaaagtttggcctctgccctccaggacaccccacagaccttttcccttcacccccttctttagcactgcccttccttatgtgaggcacaatgctgttgactagatcacaactgtctgaacgacactgctgtctgtgggaagccaccactcagcccttctctgaaggcagaacttctctgcagtgtattatttaatacttcttccaagagcgtgcctttttccttgtgcaaatgctcacgatatttattagcatgaaaaccttgggggaacgcattaaccaacctggacctcaagttcctatgcaaaatggggataatgacacgctcccttcagcagcgcttgcaagtggattcattgagattctgtaggctcctacccctgttctctcctttccgatgataactttattctaaattgcagaggcacctcaccatgcgtggcctcttggtatttaccgtaagagtttttaaggacggaagttaatgtaatgtgtctaaacttaagttttttgaggatcctgttctccctatgcctgtatttatctacattactatccaattgaaaatgttaacttctttaccaatataactgagtggtttgcagatctctgtatcatgaccagaatagcccatccccttgtaatttggactaatgtctgagaaggcctgcatgagtaaaagttcaaattattttccagttaaaaaagagatattgtatgactttcaaacccagcaagaatggggctaggaaactatgacaaaaaaaaatctttagggaaacagtaagtaaacagatgagaatgattcagaactctgttttgtaagctctgtattgatgactctctttatggccatatacaatacccactgagaaatgctcatttataactcccgccatgcttaccatgtttaaaaacaacttattgttttaagtagcttcaacagtcacccgaaatcctattgacactgttaatttgcttagcaaagactttctttaagatcttaaaaggtaaactttcacccagcctctgtcagaatcactatggattagagttatccagaattaagaaggtttagttagctcacttccattctattgaacttactcaaaatgtcagaacattctacatttctgacatatacaatgttcatatgatgacagtttttatagatgcctcacatcatttaattccaggcaccccattttaattgtgtcctgttttatctgttgattttttaattggcaaataagtaattttaaaaggaaattttaattcattttcacatacgctggctctactggagagctcatagggccagacagcaacagaccccgccagatttgaatttttatctaaattctcaatctgaacctcacgcttataaataaatgtgactgctggaaagagtttgagtgttggagtcaagagaccaggctctagttcttgggcaagtctcctaacctcctagggcctcagtttccttgtctaaatagtaggcagttcaatggggagattctcggctgcctttccagctcttagtaccctgtgattccaagattctcttctggtcatttttcttcccagcatctatccagaaaaccccactctgacatctactttccagtatttacatgaaaagaacttattttgttctataacttgggatgtttactgtattgggatttctttgagtgggacatccttaatgcaggacgttcctaattattcttaaactgtcctgtacgatcctaaaagtaccctgaaactccgtgtatggactgcctgaattgtgaacattaacccacatttatataatcgcttggttatgcaatcaggcaatgaagtttaggttaaaaagaggagtgccttgacttttgtcttgggtccaggatccgcccttgggacccatttatcacctcatttcccttcttaactcctgtttatctctccggttcctattcaaaggaacaggaaaacacgcagtacagcactccatttgattacattgatagctctgagtgaaaaacaaggctgtccacttggagctgcgataagtctttttttctgtgctatgaggacactaggtgtgaacagatactgacatcgaaaagtagagggttgaggaggggggtaaggaggaaggaaagaatggcaaaggagttatgttgcagtcagtaaaggttagaaatgaatcacaagatcggggtaggaaaccaagtaataaaataagtgcataatagtgggttgccaggcagacagtgggctaataccgaagtgacaatggcagtgcagcagggaggctgagcaacagaaaggagtgggcgagatggaaaaataaagagagaataataaaagccaacacagagggggagagcagaggagtctgtcactttgtcttaggagaaattaagaagccagacaaattataagtgtactttcatttggaaacatgatcagacagtctgagatgggtgctcctggatgaggtgatcatggcttgtagggacctgtgagtggctcgctctgacctggcatgggaagggccaggacttgccaacgtttgcaggtggcaatgaagtgcaagactgagggaatgcaagggggcttattggatctctttgattcttctgttcagaaagaaaagagtggaagaagatggctaacattcttaagggcccagggccaatgtgggtgttcccattgaattctcaccagggccctatgcaataggtgctggttttatccttctagttcagatgagaaaactgaggccaggagcttgttcaagatcacatgagcagcaaggactcttgtttctgacctctctgccacctgcctgcccaggctgcctgctgaagccactgcatcaccgtgaatgtgcatctcccacaagggctggtgtgtggtttacagccacagggaggcgttttcagggcccatctggggttggaagacattgctttcctttgtcctgacaccaaaaaggaaaccggcgtggccactctgaacattttgtcttctttggcatttggttgccttttttccctcctccattggcaatggatctatcaggttctcagttaaaatgccgcattgcccaagcacaaatgtgaccctcggtgtgtcgtgggaacacattgcacagagaactccaccacactcaaacgctgacagtgccttgccagccctggtggacttgaagtttcgatgagctttaagttcgtggagcagcttagctctgggattgtggtaagagtgggatctagagagatgggagttcctcctgcaaatgtgctcttgagcctattttgaggtcactaaccatgctcagccacagtggcctctgcaggttgaggagggattcgctgtccttccagaagcttctctctagtttcaaatgtcatacccagatgaagaaaggaatgcttcctttgaaattgatgccatcctcagagccaccacactgagtgcgggcctcttgcacccccatgcagagtcctgctttgctcttcctgtattccctgctgcaagacctcagggaatgcccatggactgggcacttcctgagcaggttttcactaaaagaaacactcagcaaaacaaagaaagttcgtagagtaccgtccaggcctagctaatgtttcataaggacaatagaaggcatcatttgttttcagagcataattttattatatcttaatgcaagaaaaggtaagataaatttcctattattttaaaataaccgtgtcattgttataataccatactatgataataaccattttactgaaaatgatgaatatgtaattgcctttcttatatattagcatgttatgatttactaccacaaatgttgtttttcttttcttaattaatttttatactttcagtattgaaaaacttttcagcatcttctaaattggctcattcaggcttgcactgtagaccttttgcaacaagcctatagttctgccatcgtctctcttttcacatggtaaattgccctgaaaggtttaatgaataaatgaatacattaattaacaatgcccagaaaagggtctcattaaagcagtgtgtgtttgggatgcttggctggcatttggtggatgggggctgactatcttatgatgaaagatgaacttaagccccctgaactctctcctatgactcacaagagtttttactggcatggttatgtaaacgagcagagcatgagggaaattattgtttaatttcaaaaacataactgaatcacgaatacaaagtgtgctcttgcttcatgctttgatgtctaaggtgactcaccgcatggtactgcacttgaaaggagatggagcttggagcaggtttgcctgcccgagggaggtcatcccatgtgccaggaggatgcaaagtacctcttgtgggcagggttcaccttcagtgccctcctccgagactaaaggtgcagagacaccccgcagggcaggactgtgacatggcctgtccagcattctgcactacgtgaagaatttgctacccaccacatacctgtagcactcccctaactctgtggcaaccccccagactcccgcatatttccaaaggcagccccttgccaggtggtgatgagggttctgcctcaggttgagaacatgttgagatgagggttctgcctcaggttgagaacatgttgagaaagtaaggttctgccaagttctaaagatgccatgtgcacaggcttcgaagtgcccatttgtctctcttggattaacttgtaatcaatctaatttagtgctgtttttaaatctagcaagacacatttgtttattttattttgttttctaaataaagaataattgcagaaagaggcttgggatgtctcaggaaaatagagaggtaaagtgctccatgcaaataaaacccagaaccttctcaatgatgtgtttagaggctgaaacaaggtagagtagtgcacagaggcggagccttggccaaggtctcccgagtgcatcggggagacgctcacgtctacatgatctttccaggtgccagacttactgacctccagcttttcacatcctgggaggagattgctctcaaaggtacactcatcttaaccaaactcaagacagcgatgtctaggacaagaaagctgacatgctgatctgtgctcaaaccagagttgagctggctccaagagcgtctggtctccaggatctgcacggcctttggaaaccaaagctcaatcccaggggctcagggccagagaatcaagcaaacatgctggttacagaaactgaaattattcactcattcgacaaatattagtcagcacctactctggtctagcgactgttttcagagctgtgaccaagacagacaacgtctttgtcgagcatggagattatgttctagttagtcgtagattctgggattgaacccctagacaagtgaagaaggcaacgtcaaatagtaactgtcagaaaggaaacataacaggggcatgtgttgcaggagctgggaaaggctgagactcggatgacacgaaggcccgtccatgtgcaggccaggaagggtgctccatgcagaagcacagcaggtgcaaaggccctgaactggggatgagggtggctcgaggatgcgatcaagttcaactcacaaaggggaagccgattgtgaagttcagaggagatccttctagcttccaaggctggaccacggtctgagacagaggcgagaatcagcagacggaacaggtcaataaagcaatgcactggaatgttcaggattcctctggttgttctatgtgatttcccatggctgtctcacccctcaaagctgttggcaaggtgcccggcctgcgaactgcactcagatacatgttaacaaatggtcacggcactgcagaaagaagaatggagtggagtggacagtcctgcagtggctaaatgcttttgttagagtgcaagcgtctgtagccacagatgatcagctttctcccatcaccaagatggcccgtgcaggccctggcttcccggggagagttagatttcatctctgacttagacttttttttgttaaggaaaaacacatgtcacataaaacttttttttgacatgacaatacctggaataattagatacataaagaacaatgagggagctgcgctttcctgagtgtattttgagcagttattacccaccatcagtgcctttcaaatgtcacttgtggagtgttcgtctgtttgtcgtgaagcacaaaactttttctctattctttcccaaagtagttgagagcattttaaatctctgtgttgaactatggcaagtcactccaaaattaaagtgctcaaaacctttattttgaaaagcccgaacagtgcccatcaaagcagcacagggaacactgtcttttcagtactcacccagcacattcctctggaaatgtcagatatgctctcatttaaataatttgacagctcacaagaagccatctgatgagtattgcattcaattgttaaaagtacaacaaaaaaagtcaagaagtttttcttccaaagaatttatcattaataattcacacaagctactttttatgtggtcgcctactgaatgcaattatttaatttctctctctctctccctctccttctctttctctgcaagtggaggctgtgaagacccattttaatataaaggacactcgggagtttcacctgaaatgaaaaaacaatgcattaaggctgcttaagtaggtttcgcacattcaatatgcttgcaggaatgtctaaacacagaagtgtttgacacgtatagaaaaatacatgtatttttaagacatacttgactcaaagcacctgaacattttatttaccaccataaggcagtgcattgaatccagaccggcctgttttgtggctgcacacattccgtttggttaaagaagcattcaatgtacaggggtggttgtgcacctccttaaacttgtgtcctggacattgaatttggccgaatagaaacgaacatgagcccctgaaagatgagttcatggcctggggatacaaatgctgagctttttgtggtttgcagtgtctcaggttgaatggatgttgcaggtctaggggatggatactcagggacacaagggtgtcagggacccccttacagctgttcccgcgcctgtcattcatttagctctttagcctctactacgtcttcctcttttactactttccatctttgggttaaaatgcggagagatgacttgaatgagtagcacactctcacactcgggccagccctccacatcatgagtgggcttcagccaccccaggcttctggggaatgaggtggggtacgggaagcaattaagaaattgctaggccaggcgcggtggctcacgcctataatcccagcactttgggaggccgaggctggtgaatcatgaggtcaggagatcgagaccatcccggctaacacggtgaaaccccgtctctactaaaaaatacaaaaaattagctgggcgtggtggtgggcgcctgtagtcccagctacttgggaggctgaggcaggagaatggcgtgaacccaggaggtggagcttgcagtgagcccagattgcgccactgcactccagcctgggtgacagagcgagactctgtctcaaaaaaaaaaaaaaaaaaaaaaaaagaaattgctttgctgacacagcccccttgtacagagcaccttgtctttgagggaacagctgtcctctgttggggaaaatcgggcccagccagcctgacttgctctgcacatttgggatgtggccggagcctcagaatccacttgggagggtgtgtaccggctgccgtgtttcctttcggcaggcttaaattcatttcttcaagtgttcccgttagttaacaatgattgatagagtgaagatattattaataaaaattaggtacccagctaggcaatggacttttgttcatgcctcagcactcatcaaagggcaaatgaaaaaggtgttttcagcagcatgcgattggaatgagtcgggccaggtggaaaacgaatctggccattcatcagagctgtcaggacgggtctctcaccagaagtgtttaccagtgttcaccatgagcttccgagttctgctaacgggagcttcgactgtaactcagaggacttggaaaacgacttgggtgacttagcgtacctatgttattgaattcgcctaagtgttgcgactcttgatgctgacacttacgagaatgcacagtgggacttccagaaaatttaacagtgcagttcagaaaaatgcctccgtgggggtggggggctttgaggaagtccaggtggcatgggactggggaggggaagaagcaaggagcacagcggcgtcgggagtgaaaaatgtgccacttattccacacacataataacatcaatctgattcaaaaaaatgagagacaaggggagtcgacaggaaagcatacggaaaaagttaaagaaaaacccaaggtgctatcaccgtgactgtctgtctagagatgtattggggagtgggtgtgtttactgtccatacaactcttgtggttctcagtcattcgtagcattgtgcagcccacgggtgaggagctggtcttcctggctgggcctgggcagcagacatttgctgagcgcctactatgtgccaggtgtggtttggggcaatgagaatgctaagaggagtgagaacgcagactcctagaagttggcggctcagcttggactgtcttgtcccctccatacttagcactccataggagacaattgttaaataaataaaaaaatttgcacccaaaaagaactatgatttttatttcccccttctagaatttaggagtgtctgctcagatgtgcctggcactatgttaagtgtgtttatttgggttcccaaatctaatccttgtaagtaactaccctataaagcaggtaccataattatcctcattttgcagttgaggaaactgaggaagcatagagagggtatgccttggcctagggctacacagtcaagatgtaaaaggaaacacctgcctccagaacccacactgttggccgctacatggcattgcctccccaaaccaccccatgggccctacagataaaaaatattgagccaatctgtacctcttctaaaaaacgatttttttttaacatagagatggggtcttgctgtgttgtccaggctagtcttgaactcctggactcaaacgatcttcccacctcagcctatcaaaatgttggcattacaggcatgagccaccacactcggcccaatccttacttctgatgctgttactggccaagtgggatcaactgctcagtgaggttgattagactgtatagaagttagtgtccaaaagcccagggaccccactgccttccaattcatgagcacttgactctggtacttaaagagagagctccaaaggcctgggagctgaggccagcccctgcaacagacagccatgtcctcaccctgctggccctgccatgtcagctcccgataggcagcgagggatttggaaagaggcctcttgcatcattgcttccttgtgccaagccagggaaagaaaacttgtataacctaggccggcttttggcagaaaattggaaggtggaaagccatggaaatgaaagttaaagaattacggaccttaccttatacgagaacgtgcaggtgcccctgaaccctgcttcccaggttcctgtttgaaacaccaccaacttattgagaagatgagtcctccctatctgtgttggcttgtgattctgttatcccatagcagatttttcatctgcgtcacaattttgctttttaaatattgaaaacaccaaaatgtacatttctttccccgttaccattgatctttctaggttgcttcttcaaagcaatgtaggctagttttgggaaggacacttgtcaactggcaccttttttcatcagactctgtggtcatttttcagacaaatcgtgttttctgtgtgcaggaggatggactttacttctgcaccaggttatacgaacagcagtcctgagggtgctcaatttccactatatttcaacttggaaacatttcaggtttctatagctaagatagaggcccgtgaccctgacaagacatgctgaggccggacccccaccctgggtgatgtgtccaatcgcccaagccttgacacatgtgaattctgccctccttggtagaggagctgacagggagactcagatttactgaatttttggaattgtccccagcgtggatcagaaaagacatttttgttccgcgctgcactattacaggcaaggggaacaatttgcatagttaccagggagctccggggaagggtagcgttcagttctcaagcaattatctttatttccaatagagttaactgcactgcaaagtggatccattttctcactgcaaaataagcgcattggattgtttttgtggtaactatgcaattagttcttcctgctcatgccttgcctggtgctgctgtcttttctccgtgagtgtgtttgaaatagtattcagtggcaaatttgttctcactcagagaatggacttgcttactctgtaatacttgaaatcaagggcactgtggatccccagggccatgtccgttttagggaggaggaaactgaaaccaaagcctagtgagctgcccaaaggacacctcgttcccagcaatgtcatgatggagccatctgtttgtgtgccagatcttccgtcggtccttctggagtctaacacagatggtgcacacattttaaaagactacatgtagccacctagtgccctcaactctaaaagtcataagcaaacaaaggttgggaaaaaataggaatggggaaagattttaataaaaatctggatatgctctatgacatgcaaactgaaggagagaactaaggcaggcctataaaaaatgggggcaagcctgagttttacactgcatttcgtcttatcctccttagtcatccttttccacctaaggtagctgtggacttaaattacccgccagctttcttcagtagcccattttcatatgcgcatgctgcataggagcaaagacctcctgagcttccaacaagaagggctgcttagcagacacagggccaccagtcatccagcgtaggtgagaggggagtaaggcagacatcaaacccaccatgggcttcaggatctgtggcagggaatgcgtacagtgtgataaagggacaggacttccccagtggcaatgaccttagagcgtatctcatccaagtctgcactgcccaagtgaggagaatgaggcctgggcaggtttctgggggaggtgggactggaaccaacccaggtctcctgagtcttgttccgtgtaaactgactatgggatcttgtcttcattaggatgcttttagctgcaaacaacaaggtcacccaactccacgcagcttaaacgacaagggatgcttctatctcacattctaagaagtccccagaagactagtgccagacacaggagagtagctctagaatctgcttgtcctgtttctgagggtgattctcctattattgccctgggctgcagccttcatgtaagtgaatggtcagcatcacaggggggtgacatcgctctctgaagggcgagatccttcctgggatggaggtggcgtgcaatgttgggctgtggcacgtgcatggtttctcatggctggggcgccattaggcctccccataaacctgacagagaaagctccaaagaaaatacgccagcttttacagtcactttgctgtgggtcagtggtgattgaaacaggagacacccagccctcccaaaggttctaacacctggatatttaacatgtcttctgggcacatgtttgcagcaagaatcatgctttaataacaggcaccaagcaaagtggtgtaagtctagatacatttttatttccttattgtgggaaaaaatacatgaacaaacaaaatcacaaaacttctggggagagagtttttgaggatatgaattttctctgctgggtacattcagccctgagctcactgccttacgacagcacaggccatgtagcgaagcgggaatgattaggttgaagtctgggcagggtgatcggtgtgttagggacctgcctgcaccctgagtgggctttggataccatcctcccactacttgttcccacatcttcaaaataaaagactgaacgatataatcttttttaaaaattgagatgaaattcacacaacaaaaaattaaccattttcaggtgcaaatttagtggcatttactacattgacaatgttgtgtaatgcccctctgtctagatccaaaacatttctcccagaggagatcccccaacccattgagctggagtgacgtcatcttttaaggacctttttaattatatgattctatggcatcagaataggcacttgactcattcagctctgtaaagacaccctccagactgcaaagacattgagataatcccacaaacatgaaacttctaaatatttgtccctaacaaacacaattgaggtggggtggatgacctgaatcgccctggtggatgactttgtggctgatcgttacagggctgactggtgttttcctgctgtcagaagcttcatgatggggccagtcgggtgcccagtgagtagtatccctggcaacagagacccaggcagatttgcgtaaatacctttcgtcccaggacatgggatttacactgtgtgtttctcgtcaccttcaggaaaaccactgtccctttttttctttgccagataagagtcaggctttcctacaaattcagattcctgaaccaaggggcatttttgtggtcatcccttcggtgttcccgtcactgccgttggtggctggggtgaagtgaggaggttgtggctgtgtgtgtgagagccttagcttgggaaaatggtgtctttgccgtctctggttctcaactcttcagcacaacttggttgtgctgtgtggattttcaacatgttccagctgtgaaattccttataccacaaacatccaatatggaagccggaaatgtacaacaggtcaaatcagagatgccatgggtgaggagggcttagagcccgtctcctacagcctttctctctcctctgtgaggggtgagtggaatccccctaaatcccttagagcccagttgggaaaacacggaccttgactttacatgacctccaagcactgctgttgagagtgtgtgtttgttttttttttttgagatggagtctcactctgtcacccaggctggaatgcagtggtgagatctcggctcaccacaacctctgcctcccgggttccagtgattctcctgcctcagcctcctgaatagctgggattacaggcatgcgccaccatgccaggctaattgtttgtatttttagtagagatggggtttctccgtgttggtcaggctggtctcaaattcctgacctcaggtgatccgcctgcctcagcctcccatagtcctgggattacagacgtgagcctccgcacccggcccagaatttctgttcttttattggcctccaggtaaccaagaaacaccaacatgtgttgcaatcagactgtcctctgaatcctccactgtgagaccccgccaaagtcatggctttgttttctgttgttcatctggaatgcagccattccccacacccacctccccggtcacacctgctgcatcttggctgtccctgcgcgtgttttctgctgtctttgtcactgctccatcctgcatggcattctacaggctcgtcaaagtccagttcacccactcttccagaacccttcatggtaggctgctgggagaaattgggctacagtccatcacaggtgcaaaatgacacctgagaggtggccctgtcactgaccacttcttccccaacacatgctcagtagactaagtgtggtggacaggcgcaccctggcctgggggacccagaggacttgtgtttggaactccccttgcttccttgggtctgccatgactgtctggccccctcctgcaggggccttgtatgagcagttcgaggaacgttctcactaactgcaaagcactgtaccaatgtcttgattacattttagatagcagacagtggccctggctctcccactggaactgtctatgtggcacttggccatgtacaacttctttaattggaccatcatgtaggtctgatgataaaccaaatactctaacatcagggtgggggtctccccaactccatcttaagtctttgaggaaattgtttcttaggcaagatagctccataacttgtgggaccacgtgcaaaatacacagggccccttgttcaaaaaggacaaaaaaaaaaaaaacctgtgttcctttctcccatggtctctctatctgttgtggcatgttttgcatttgctgtttgatgttgcgctcccttgggcaggggatgctcatgggaatgagtgcagaccctcatgggcgcacaactctgacctgacttccctgcccttgtgctcagaccctagtcggggtggagggcagcagtggtcacctagcaggaagagacaggggagcgggcagctgaggctccatccttagaagcagaaaggctgagggaggcagaactgtacaagagccacgccgcgtgccccatcatcccttcaaatgtagaagtgacacaaacttagaagatcactatgaatttcaagacagtgaccccagagcatgaaactccaagagaagagcccccttccaagagtgaggcatgctcttgagactatgaagtggaccctaggatcagtatgaagtaggtgctcagcaagtgcttgatgactatgtgctgggagtatagacaggaaaaggactctcagtttgaggacacatctagagaactggcaatagtagctgctcattcactgttgaaggaatgaatatgattcctttctcgaccctcgtctatacccagctgggttgagaccctcagtttcctcatctataaaatgggaaagataacaaaggtacctacatcggagaaaatcatggaatgcatcccatttctggcatgcagagaaagcccagtattatgaagattattatgcccggtgctagagacatagcaagcatttaataaacgtttgagctgaggcttcctagagaatatgagattgcagcaaattggatgcaaaacttctctttacctttttaaatccgtctaattatctcgtatcaggatatagctggtgtggtcacaaagcagggaaaaagcaatcgatatccctgagtaactgcaaaacatggagtggccccaggaaggtgcagggaggaagtcccttttagtttgaaactattttagtgtccgatctttctttctccttctttccccaattttgtatctgggctcaactttttatacatttttcaaaagaagagcagccttggacctaagaaaatctgagcctaaggagctccccaaaagctaggaggtctctatggcatccgtcccagaaacaactaacgcaactcacaggcagcgtgagccacctccatgccccacccactgagcacacactgcaaagtccactcggcgggttaactgggggtcctcagggatcccaccagcagggtggctgtttggctgcttcttcgggtccctgttgaaaccaacagacagtagttagttttgaggcttacttacaaataagctgacagtcagatgaggaagacccatgcttccggccagccccttgaaattgttgtcaatgagtccccactggggcagggagtctctaaggacaggaaaaatgggggcccgagggcatcatctgccaagacctaaggcaactgtacccatacttttgcctgtgtgtcctcaaaacccctctactttatcatgattcttcttccagagaactctgtcctttgaggcaagtctgtaaaccaatgtttgctttttaacattttgacaagggacagttgcgggggaatcattaccgtccttccacgctgtaaatgcaggtaatgaaaggatcggatgaaggtcgttggtgactcactgctctgacgttttacttgaactagctgtttctctcccagaagactcagaacataagcacctggaatggatgggtcgcatttaggactccaaatgagttctgctttccctttttgttttcaatctatgtgctctttcaggtactcaaacctgttaccgttttatcagcaaaatgggactttctaccaatttggtgggatgagtctcgccgggagtgatgtgtgtgtcacggaattgtggtcatgcatcgggatggctaattcactgatgtcagatgctaacgaagtggcctcggctactgagcatcacgtcactgttgggtttagacacaacacgatcttatgtatggatgacagcaccactaataacaaatgccagtgacctaaacggggaataacttcaaatgaaacaaaaagcacctcatatcatatttatcctgaaagacacaactggctgaataaaatctgaatacaggaaacatagcaatgggttgataattttggtggaacttgatgatgtgtgacccacgcccaacacagtgtgacccaagcccccaggagggttctctaagtgagtttggtcggaggctgccattcacagtgacttgtatttgccacagcagctctttctaagcccagtcctgggattatctcagggatcatcccacaccccagcggggagatgggccaagtccccacctgacctcatcttaggtagagaggcttccatggaagtgtgggctggctgtggggggttgagacctagccccgttcttttgacatttcaccctgtgttctccaaactccagcaagcagcttccatagctcattaaatttgactgaaggtctgatggcttgcaaagcaaattctttacaactgttataaaggtttcattgcttaagcatataatctagcaaaactgccaagccccctccactccctaaactctaagacttgccagggaagagaacagtggccagtggactgcaggagtaactgcactcagcccagaactccctggaggacacagggaaggttctggaaaggtggcggtacctcacagggagagacgtggtgctccagggcccaacttgctcatgttcagatcctcactctgcaacccaccagccggctgtgagtggctacacaatctctgcctcagtttccctatctgtacatgggttgttcatagcctccacctcagagggtagtaatgatgccaagctcttagaacagtgctcagcatgtgtgcatcctgtgcctactctatgccaagcactacagagagaaaaatgaacaaaatagggagaaatccctgccctcatggagtttacatcggggcagggggcgggggcggcacagagcagacaatcaatacagtgattagcccccagttaggttaggcatttccaatctttgccaataagccacatatttgcccaagttagggtgcatccttcccatgaactttgactgtgacctttgactatggggtgacatcttatagctgtggtgttttgccaaccagcagctcttggtacacaaaatgtgctgctagcaggtgccccggccaaccttgtccttgacccacctgcctgttaagaaaagggtgttgtgttttgcaacagcagtaaaatgggtcaaggtttagtcagttggaagttgtgtcaaaactcactatggttggttgagggctcgaagtctcccagcattcattaacaactatctgttcaatgattatctccctggggcgtgttgcagtgagttggcccaaagcataactgaccctggccgtgatccagagacctgccccctgacgtcagtggcgagcctccctgggtgcagctgaggggcagggctattcttttccacagtatttaaagctgggaggttctgccaccaagcacggccttcccactgggaacacaaacttgctggcgggaagagcccggaaagaaacctgtggatctcccttcgagatcatccaaagagaagaaaggtaagtagagctttgcatttacattttgaaaaattacaaagatgaactcatttttttcctgagagcaataactatttggcaatgcacagccctggcaaaaggccgtcgaatgtgtttgaaggtgtctgttgttgtttttgttcaggacgcttgcgttttctatttcaggtgacctcacattcgtgccccttagcagcactctgcagaaatgcctcctcagctgcaaaacggcctgaacctctcggccaaagttgtccagggaagcctggacagcctaccccaggcagtgagggagtttctcgagaataacgctgagctgtgtcagcctgatcacatccacatctgtgacggctctgaggaggagaatgggcggcttctgggccagatggaggaagagggcatcctcaggcggctgaagaagtatgacaactggtaagctcggcccccgctgcctgtcccagcaccctgcaggcagggctcccctgcgtctcctgggagttggtggagaaaggtgaatgaaggccttcgggtagtttcagactcttgagaagatgaatgcaatggtcagaaccatacagacttgaattttgtgacattagtgggccagcccaagctttaaatgaggtgtgtgcacaaaagctctgccaactagattcctgattaaaaaaaaggcagcccctctcctacagaccaggtcctagtggagtaaatgtccacctggccatgtcttagatggtctgtgtgttcacactgatggactgttgttagcgtgctcagcactctgctaggcatggaaagccacggtactgaaggagatggttcgctgcccgtggtgcttggctgaaaggaagcctgtgatttttgcagctggttggctctcactgaccccagggatgtggccaggatcgaaagcaagacggttatcgtcacccaagagcaaagagacacagtgcccatccccaaaacaggcctcagccagctcggtcgctggatgtcagaggaggattttgagaaagcgttcaatgccaggttcccagggtgcatgaaaggtgagcggaacattgatttgattgggtaaaacagcagagagccttttcttatttacatctatcctaatggtaattcaaacaataatggaagctcccaccacctcagatgtctttcagttccatacatgaagttggcaatgtattgaaaatgcacatccctcttctgcttttacagactgtcttatacaaacgtgaaaactagttccatgcatatgggttttaaatagcttggtgggacccaattgcacatttatgaaaactctttaatttcagcaggctgttcactttccagtggcctcttctaacccagggggctggtgaccagcagggtgtggtggtgttagtggaacaccgtgaaaatgggtctacctgggaaaaaaatgctggtcgtgttcgaagtccaaggtcatttctcaccagtgcccacccatcgcaccctgtaggtcgcaccatgtacgtcatcccattcagcatggggccgctgggctcgcctctgtcaaagatcggcatcgagctgacggattcaccctacgtggtggccagcatgcggatcatgacgcggatgggcacgcccgtcctggaagcagtgggcgatggggagtttgtcaaatgcctccattctgtggggtgccctctgcctttacaaagtaagtgtattatttcagaatcaaaagtcaaaataaaaaagaaagctgaacgcaaaccccagtgagtgcctcggggacccccaagcagggccctggcgcactgacttgggaggggtccttgttcacagagcctttggtcaacaactggccctgcaacccggagctgacgctcatcgcccacctgcctgaccgcagagagatcatctcctttggcagtgggtacggcgggaactcgctgctcgggaagaagtgctttgctctcaggatggccagccggctggccaaggaggaagggtggctggcagagcacatgctggtgagcctgcaggaagccctgatgtgcagatgagaggcctggggggtggcagaaacaaacagcattacagttcccacccgtcagcacacctctctgagcgtgcaggttcccggacagatcgggaaaccccaccagtaatgattagtttacacatatacatcgcttttgaaggcccccaaacaccaggggaccatagagatcctttggacttcatgattctgggagtgtttgtttgcactgatacctgaagaaatagatcttgagggcctacattccaacctctgggctgaagtaccaacctcggggagaaggaaacaaagatcacaataaagaatcttgtccccaacagattctgggtataaccaaccctgagggtgagaagaagtacctggcggccgcatttcccagcgcctgcgggaagaccaacctggccatgatgaaccccagcctccccgggtggaaggttgagtgcgtcggggatgacattgcctggatgaagtttgacgcacaaggtgactcttttagacccaactcttggtaacgattggactcaagcgaatcgttggccttcgaaacatgtcacattctcctcagtccagtgtttggatttttaaactctgttagtccagagttggccaagccttagaaatatggatcctgtaagaattcttcaacttaatattcaatctggattgaaactgggccatatgttgctgtttgtttacatacatacatttgtttaaatggtattggtggaaaattgtggaggaagcaagagtcgtaaacgtatcaaagttgcatatgatgcttggatgaaaagagataaatgcatattctagggagggaaaaaagatttgagaagttggcatagaaattagtccggcaatatataagagtatatgttctgctttgcctggcactcactactgcttctctggtttaaaactctccaggtcatttaagggccatcaacccagaaaatggctttttcggtgtcgctcctgggacttcagtgaagaccaaccccaatgccatcaagaccatccagaagaacacaatctttaccaatgtggccgagaccagcgacgggggcgtttactgggaaggcattgatgagccgctagcttcaggtgtcaccatcacgtcctggaagaataaggagtggagctcagaggatggtgtgtccctgccagaggccttggtgtgccgggctgcagggactgcctgtttgagccaggcactcacgagcctttctctgtcttataggggaaccttgtgcccaccccaactcgaggttctgcacccctgccagccagtgccccatcattgatgctgcctgggagtctccggaaggtgttcccattgaaggcattatctttggaggccgtagacctgctggtgaggctctccttcatttaggctgggaacatgggtgtgctgggtaccgaagggcatctgtgaaatctctccttttccatgaccttgtcagagggtgcccaggggcttcctttcttgagcttccttcccaaagatccagaataattggcaagttcaaatgtagaaccaacccttctggtcacctggaacctttctgaatccctgatctattgtagcttgatcaaattttactttttactttgtggcctcagtcatgtaactttgagttagcagttttctgcaatttagcttggtgaacgcaaaactagctcgattacaaagttattgtcttgccgtgtctttccgtgttgtgaataacaccactggttgtggagtctgaatttcaaagcctctgatgaacatttctctttttttttcctgctaaaggtgtccctctagtctatgaagctctcagctggcaacatggagtctttgtgggggcggccatgagatcagaggccacagcggctgcagaacataaaggtaaatcaaagtcctgatctgaaaccacagagaagtgggattagagcactcttcgtcactcttatgtctctctccttttctgtgtctgtgtgtggggagagagagagagagaaagagagagaggagaacaaagcatgctaatgtcaacaatcaatggcgtcagtcttgcctaggagagcctcatttactaatgaactccctctctgtttaacaggcaaaatcatcatgcatgacccctttgccatgcggcccttctttggctacaacttcggcaaatacctggcccactggcttagcatggcccagcacccagcagccaaactgcccaagatcttccatgtcaactggttccggaaggacaaggaaggcaaattcctctggccaggctttggagagaactccagggtgctggagtggatgttcaaccggatcgatggaaaagccagcaccaagctcacgcccataggctacatccccaaggaggatgccctgaacctgaaaggcctggggcacatcaacatgatggagcttttcagcatctccaaggaattctgggagaaggaggtggaagacatcgagaagtatctggaggatcaagtcaatgccgacctcccctgtgaaatcgagagagagatccttgccttgaagcaaagaataagccagatgtaatcagggcctgagtgctttacctttaaaatcattccctttcccatccataaggtgcagtaggagcaagagagggcaagtgttcccaaattgacgccaccataataatcatcaccacaccgtgagcagatctgaaaggcacactttgatttttttaaggataagaaccacagaacactgggtagtagctaatgaaattgagaagggaaatcttagcatgcctccaaaaattcacatccaatgcatagtttgttcaaatttaaggttactcaggcattgatcttttcagtgttttttcactttagctatgtggattagctagaatgcacaccaaaaaaatacttgagctgtatatatatatgtgtgtgtgtgtgtgtgtgtgtgtgtgtgtgtgtgcatgtatgtgcacatgtgtctgtgtggtatatttgtgtatgtgtatttgtatgtactgttattgaaaatatatttaatacctttggaaaaatcttgggcaagatgacctactagttttccttgaaaaaaagttgctttgttattaatattgtgcttaaattatttttatacaccattgttccttacctttacataattgcaatatttcccccttactacttcttggaaaaaaattacaaaatgaagttttatagaaaagatggatttgctttgcttggtttttcttatttgagctaccaagaggagagaactctgattaaatatcttgtgatttaaatcctgccccctccccaagaaggtggggacgttcagaatcacacttgaagagggggtgcattgcctggtcccagggagaaggagggagcagatggggaggaatgaggcagggaaccatggttggggttttctgaatttgctgaagccactagttggcatcctttaacaattctacaaacctttagatggtgaggcttatgtggcaggactgggagggtttaatgcatgctttttgacagtttggatctggaggggtctcaggcttccacaaaaattacattgtggacagtttcataggattttgccttttaactcttcaaagcaacagttttctcaactgtcatccccgcgggggagcagaggaagacaagtgagaaggaaaaggggacaggatctgggttgagcaagcattaattgagcgccttctgtatcccggacatcatgccaacaccatgggctgcccgagaagagaggtgggtggtttggtccccagctctgccttgaaccctcacctgctctcctctactcccagtgtttattggatattccagaacagtccaaacgaaccataaactttatatcacagattcaatctgtgtaaatactattatcttcaagttgtagtttctttcttgggcccaggctgtgaaattggcttcacccctaccacaccccagcgggcaggcttgttcttatgtcacactccacccctccagtctcctcaactggaaaacttgcctcttttcctcacttcctctgctccttacaatggcttcatatggaaggtgaagctgagatcaccccaattttacaggtgaggaaactgaggtcaagctaggagcgtccagcggggctgagaaattgccaggatttccttccccattaaggagctgagagtcttagctccagacacgttggcttgttagaatatcaaaaccaccgaaggggaaaaaccacttactggaattaaatgctatctgctgtattagtttaaatcagtggcgttcaaacttgtttctccttttcactgcggaacacgttcttgacatgtacttgactcagagtcccatgtctaaaggagacagagcccaaggcagcccacctgaagctggggagggagtccaaagtgcaagccacctggtctccatttccccgccccttgggggcctttgggcagctccttggacccctgaaagaggccaccaggataaactttgttaaaatgcatgccttgtgccccactgtcctattacgggctttcagtagtctccactccctcggcaggcaaagacactggccatctccaaattccctcccctcctgcacagcatcagccacctggcaagcagtctcacataggaccatttgccagcaggccctgcaagcctgggggacagcctagaggaggtgacttacatacacagcataagagttttcaggagaccaaaaagattcaatatatgtcattaactcctgactcagtttccccaaaccatgcctcctgagtgctccctctgtctccaaatcctgatttttgtgcgcggacccctgtctacaataaacaggatcctatgacttctttcttcaatgttctcttgtcgtgccttcagatgatgcaaagtatgtaagctaagcccacttgcaggaagctcacagaaggcaagaggctcatcacttgaaaatacggttggagtgagatggaaagcccagagtctcctgattcctggtctaccactggaccacatgactccaaaaccaacactgtgactgacgtcctctactggagtccagtgtaagagctgtcccctgacctccaggaagctgtgttgcagtctgggttaaagaccagaaaacaatagttacacagcaaatgttgaaccaggacaacaaacctgcccttattcccagtcgagtcacttagggggcactgacaggtaggcaggcggggtggctaggtggggccggggcacacttgggagtcaggagttacagggctctttctcttctctccctctccctggggacccaccctaacctggacacccccgggctgctcactcggccctctggatgccaacagcatgcaccttccagagtgcacggttttggctgtaagaccgcaggtcatgggccctgttgagctcccttgacctgcagccctgccagagggcaccgagccaggggagcagcttttgctttgtcctcacctttagcaattgcagcgatgaattcatctatgggaaagagctggccacctgcttcctccctcctgccctttttccttccctgggggcagtaaacactgacaaccttgaacacagcagagctctgccgctggccagtggggtcttcttctgtctcctctgtgccactggggtcatattacctctggtggagttcgataaggatgaaataaactagcccagcgcagtgccgaatctgcagtcaggagggtctgcgtgtgagccgaggccctacatctccctggaagtatgcccttaggtgattgcacgaaatgctgagcctcaggttcctcaactgtaaaatgggagtgatgattactttcttcagggggttgttgaaaagctccaatgagatgatgccagccagggacttggcacacagctgggcctggtgggggcggttgttctcatttttatttcactccacctctccggggtatgggaggtcgctccccaccaagccggctgtcccactgatgaccggctgtggctctggagtcgaaatctgtcctctgtgcagcctccacaactcctactttcactgtgcatttcaggaaaaggagctgaagagcgaagtcaatcaggaatatcagaagcatttttttctcttcgtatggcgagcccatccctgtagggagccaccttcacccttctcaaacattttagcagaagactcagagtttgggtccaggaattctatatttaagaaatgtgtcctaagggaaaaatcatgaaagtctgcacagatttagttgcaaggatgctcattatggagttgtttatcatggccaaaaattaggaaccaacctaaatgcccaacaataggagattacttaaaagaaattgtagtccttttgagaacagacaactaggcagccatttaaaatgactctgcaaaagataagttattgacatgcaatatttgccaccggcttcacctgtgaaggtagataatgaaagggtatcgagtatttgtacatttatgcttagaaaaaaaaactttaaaaataccatacaatggtaacagtagcagctgggtcctgggttgtttgattgggagaactgagttgcctcattcatattttcaccacatcattcaggctacagaactttgctgcaaaaaggggagcttggcagaggcagggggtgcccccaaattgagaaaaccctgaatgaactgactttaccccagtgatctaaggtaaagtttcttccacgggatgaaatgggggcttgagacagagatgaatttcagatgggttctcaagcagataaacttgtttctgctttcctgaagttttgtctggagattttctgctcctcctcacacaggaagctcagcatagcgtggacctttgagaggggttcaaaacacaggcacttgtgaaggccccgctcccgggaccactgggcagattccaggaagagtggccggcaccggatcgatgcgggactgattgttacagaactgtttccacgcaccatattctctctacaatctgggccctctcttagctccacgatagagctcagaggtttctctgatgctgcagagccgggatttagggatgccacagaggagcggcggacgtcatttggtccacagtagcaccgtagtgggaccaggaacacatatgccttgttgacacctgcttgcgtctttgcactggacacttattcctgggggtgctgggcctacacagcctgggccgcctcagagctgtttcgtctgtgagccccttggtaaagggatatgtaaatgtgaatgttcaccagtctgaatggcaaaactcctctccaggcgaggcaatttgcagcaaaatatgctgtaaatatttgttcagcctgggaaaattactctaattgcataattaaactcgttgttgatgctacttccggacagaatgcctgcagaggagggcccagcctgcagctgcccttcagagctttttcaatagagagactgtttgcagagacttttctctggcccctgtctcttcacagggagaacgaagaaaggaacttggggagaggttgtctgtgggagagaggagggtgtggaaaggtcccagaatcagaggaccactggtgtggggcctcgcggatcctccctgaggattagggctatcttccaaatgcccaacacacattccacgctccacggacagctggtaacttgagccaacgattcattcactgaagtggaaaaatattagtagattgaaagagatttgcttaaaaagacatcagatcccaactgaatccaaaaccagtgttccttgctaaggtaaccacagaaacacaatgcgaagtgaaagaaactggccacacaagacccctgtattgcatgagtccgttgatatgaagcgtctggaatagggaagcctgtagagacagaaagtagtttaggagttgccgggggtcaggggaggaagcagtggggagggactgctgacccctgacccccgacagctgcagggtgttttgtggggggtaatgaaaatattccaaagttagattgtagtagagtttccagaatcctgtgagtatatgaaaaagcattaaattatgcatttgaaatggctagggttttttttgtttgtttgtttgtttgtttgttttgttgttgggacggattctcactctgtctcccaggctggagtgcagtggtgcgatctcggctcactgcaagctccgcctcccgggttcacgccattctcctgcctcagcctcccgagtagctgggactacaggcgcccgccaccacacccggctaattttttgtatttttagtagagacggggtttcaccatgttagccaggatggtctcaatctcctgacctcgtgatctgcccgtctcagcctcccaaagtgctgggattacaggcgtaagccaccgtgcccggccagaaatgggtgggttttatgatatgtaagttacagctccataaagttgtaagtagaagaataatataaccaagacaaaatataccaaagattctgagttagaggcctgcattcaccatgttgaaaagagagctgaggaaggaagaggtgtgtgcaccccactgagactctgtcctttgaatctggaggagtaaaaaaaaaatggaaaaaggatggactttctccttatggattcaacgtcatttaatgccaggccaatgatcctcctaaaactaccacaagtaccataaaattatgtcatgtcaccagcaactggatgtgaaactgaggccacagggggcaaagacctgcaaaagttacttggctagcaggtgggagagtgggagccaccaggagcctcaacttctaggctgaccccactggcattgagtcaggagaccaagaaccccaccccagcctctcagcccatcaggaaacccacacaaactgcttagacagctgcagggagggtttggctcgtgtcactgcataggggagggtctagacacagggcaggggccctggacccagaggctccaatatggcaggaggggtcctatttccttctcccctctccctagcagcagaaatctctggaatggaagtattcactacaacgctaagcttctggtgtggcctgaagacagtcccttcatctctgagcctgtttccccagctgtacaatgagcactctgccttggtccctggaagccttccctgccatgaggttggagtcacatggttcttcggtgggacccttagaattaggatttagtgagcccaggtccaggcgtggggagagtgacaaggcagagagcgcggctgacttcatgagacacgatgagaatgattcctccccaagtagttcactgtagctcagcagtgtgcctgaaatcccactaccgggatcccctattgccccacttgatgacaccatctatccccacctgcttctgagttgatctgggaaaggacagtggggaacacaaggctcagactcataggtataaccccaggtcccctccattctggcccaaagcctggttcatccataggcctcaaaagtcagctagaaatccccaacctgctgctggttgtttgtctttaggggcatgtgtgaggggtttagctcagacctcaagatatcgatctatctttaagagaagctcctggcttctcccagggagatgagagggtacctgttctatggcccagagggcagcatgaggaccctcatcccagggaagccagcatctggaagaccttgtctgccatgccagttgccaacctctggagggttcaaggctatttttcagggacgggtgaagatagctccttgcacccagtggaagctggaagagctcgtgaaattctctgccaaggccaaggctctcaaatctaggtgagcggacacatgagcctgggccgcccaagactggccctgggagaccagtctagcccagttggagcctcctgggctgagcctagcccttggggttggcattagtcccctgccccatagttcccctggttaatagaactcaggtctggcctccatgggtgcggaggctgtggctgtctgtttgaagcctcaacgagggttcatcaccattaaggacggagaccggggagccggggggccggtgactcactcagcagctgctcccctgttatgtaaagtggagctcagagccattagccgataggagatgaaatttacattttgaattaactcggatcatcagactgcttcttctcgacccagggaaattgaacatcaagttggagggaactgtgggcaggaggggtgggggctcagccaagcatgccggattgcctttttcttttttatttttttcaacaggctgcaggcaaaggggacaggaggacgctgctgcgaagtcagtcttaaagagagagggagagagaaagtggagttactcattttctgttttcctcgggcagaagcacaataaatcagcatggcagaattaaattctgatctgtccaatttcctccatctcaccctctcctaatagtgattatttattgaacacttattgtgtgcccagcacttagctaaacactttatagataagggagaagtgaatttgtctttccccttctttgtttccccaacccgcatttctagtggggagggggtctgatgagagaagtagagagaccgaattttatggacaacacaaagtgctgagttatgttaggaagccttctgggtcttttagaggcagcatttgggaatctgagtccctaaagcctcctgtgaccacaatgcacagtgaaacctgctgttctgtccaaggggccctgtggacagcaccccctagaggtgtgcgttgcacctctcctctcagagcccagatgagagcgcacagctgagagacacagctgttctgagtcaagccttgcaggctgggatggggattcaggaggaaaggtgaaggtgtttccaccttcctttggcctcggagtttgtctgcgatcagctgctagtgagagtttccttcctggaaagggactgggtccagatgtccttctaacttggtttagaacagacttcctgtgtcactcaactccccaacaactcgggctgtgggaacaggggttctctttctactgggtcttcctggcctcatggacaaactgactcccaggaactgggttacatataactcaactttcggtgggttcacctgatgcaacctcatgtccttcatgtcctgccctgagatgtgtcagaagaggtcagacctccttgcaccatgggtatgggttctatcagtgaagtgatggtccctggggcccctctaacatgggggttacagtcactgcataagtgtggagaacaactactgattcaagtctgtgctggtaacagcagggtcaacttttcgtgttgctgagcatgagagaatgtgctttgaggagtgacatttttgttctgttcccagctggcggatgcctccctagaatggcaattctccaagatcaatctgtcactttccaatgaatagttatcgaacagcttctgactgcctggcacttagagtcagcccaagtgcttagatgagctgatcaggactgtctttcctaatgaattggtcccacagggggccctgtccttttcccagggtcactgaaaaacttcaagcctcaaggtataaggagtaatattttctctaaggagaatctacgttactattctgccccattcagaactgcctgatggtcagtctcctgttccatcccctcacattttggaattctgcctgggcagtgagggaaggtgcatttgcattccacctccccccttccttccttccttccttccttccttccttccttccttcctttcttccttcctttcatccatccagtcatccatccttctgtccatctatccatccatccatccttccttccttccatccattcatccacccttgtattcattgttccagcctttactcttccatttaattattctttctcatattctccaactatctatgcctctggatgcttgtcatccatctgtacatccatctaatggtccatcaacctccaataagtcactcatctgatctccatccagtccatcaatgatcaaccctgcatccatcctcaatccatcctttcatcttatcactaaggacacatagctccccatctgtgagagccgagtttgaattagccctgcctggtttttccacatgccctcaggatacaaataactgcacccagacatagcagacaagctaggtgtcctgagaggtgtagacaggttgtttcaaagtttcagaggaaggagaaggagcatcagggaaagctcctcagaggaagcagtgtttgagtactctcataaaataacatcatatttggaaagtcaagatataactggaaaactgtaggcattccagcggattatgggatctgcgtgaggattgggtggatggaggtagagtggttggagaatcaacagagggtgagtagagaggtagatgctgtgtagacggctggaggttgaaaggatggatgagaggtttggtcagattaaagggtgtggaagtgggaacagaagaaaggtagtgtggccccctcccatgctagggcagattatgaaaaaccatgccgtgtaactgagcaagggttgattttgttagacagggaggtagagaagcttgtggatgatgagcgagcccccagggagagtggccttttccaaaagctcctctggtattgtatgccctctgcactgggggtggttatcagtgctgttcttctcaacttggggatatgggggccagagacgccatggagtacaggccctaaccctctagctattctgcagtctgccatcaatcaagtgctcatggctaaaactccagccaacaaggaacttgaacaacacaagtctagaaaacaggctgttgtcaagagtttgactgattgatggtttggagctcagaaaaagtttccccatggtcatttcttaatggccatttcagaacaaaggggcagaggaaaccaaacaccttcccagggtcttgcctctggcaggggagaaattgaggtctttgatggtttcagatgtaagtgctaccctgccgttaggctaaaatttccagtatttgaaaagtcccaagctaattttcagggaggaaattagatgagaagtggcttttaaaacatggagaatcttatgtttaaaaacttgggttgccaaggaaactctctcttcaatacttccttgccaccatgttgtaaattaagcccctaactgaaaggtaattaaggtaattggtggcactgctgcagagagaatgtggcaaggcagccggagggaaggagcccccaaccttttagggcacacaacccccttagctctgggggaagctgcatccattactgcatgtgagggccttgaaggcacctttggagaaggcagaccagcaaacagctgtgagccatgctcagtgaaaggccaaggaaaggaaatctgaaatgtcacgctgctaccctgttggttttgaataggtgaaagctccatgagtcagttaatgagcagattgggaagggctgcagtgttctggccccctgcagccaggttaatgtatgtggtatcgggagagagcttcagcaattgttttctgtcactttcaggaaggaggcaattagtttgtggtcccagccatccagcaatccatctgtccattcattcatctctctatctgttcattcatctgtccatctgaacatctatccacccaccgtctatccacccaccaagccagccatccacctatgtatttgtttatccactcatccatctatctgttcacctgttcatccatctacccactctccccacatacacagctggatggatgggcatatcaatgaatggaaggatggatggatggatgggtggatggatggatgaataatgggaggggtgaatgagtgggtggagaatagacagatggatagtggatgagtgcatagctactatccatctgtccacctatctccatttacttatctatgcagccacccacctacacgtccatccatccatcatctattcatcatccatcctccatccgaccgtctatcagttcatctcctgcccatccatctagtaagtaaacatttcctaagcatccataattatagtgacaacatctcccactcactgagagataaggtatgtcaaggcctttccaggcacaatctctttagatccttccctcaacactgtgacttctggaatgtgccccattccagaaatgaggcagtagagaggttctcacagctagcaaaggtgagagcttggattttaactcttgtctataccctgggtgcaaattcctaggagaggggcagtggcttttatcatcatctatctctgcatctttgagcctggagaacaagatgtgaaggagggtggggacagagagcttggctgaagcactgggaaagggacctgtgtctcaggctccaggggccaggggctgtcagtgacccaggtccaaatgccctggctctgacctgccctagcacacccttctgcacatacctaggcctttcctcttcccacggggtaaacactgccagcgtggtcaggttgctggtgccaaggtgaaaagtccatggatcagaaaccgggcccccctgggaagtgccgttcccagaagctgaggcctttcttccagtaaactttggcctccttctttctggccgtgactccccatgcacagggagtccaggttcacatcaaaggggtggggaaggggagagaggggtgtgcagctgagcaccccatggcccagcactgcactgcgctggggcttcaggtgcttcctcatagtcaattcagtcaacatcccaactgggggcgggtctcagtcttctcactttgcagagaaggagactgaggttcatagtggcaaagtaactctccccaggtcacatggttagtttcagggagagaagtctcatctcgaaccctgatatcagcaggcagcagctggagccagactgcagtgggcctaggggtgataagtgggctccgctgtcagccaggcacttctgagctgtgtgaccctgagtgagtcccttaacctctctgtgtctcaactccctcttcctacttacagggttgagaagactcacagaaggggtgtacaccaagtgctttggatactctcggcactcaataaatgtgggctccgtgcagtacttgtctcctgtgtgtagtggaattctgcagggaaaagtttgttgggcagaggagtcccactgctgcatgctggctgaagggctgcggctgcactttgcgggaggctgaagagccaggagaagcgaggatcgatctgctgtcattcagccccaggaagggcaccctgaggcctgacagctcctccaccactgtggcaaactgcaatcccgggagaggctgccaccttgctgagggatgggtgggagctagtccctgggagggggttcccctgcatgtgtccttcacaactctcttcacaggcaaaacccggggacaagtgttaagagctctttgtcatccatctaatgaacatttgttgagtgaacccccgaggagcaggagctgtcttgtccttacctcctctgactctggtgcccagaacactgcctggtgacacccactggagctgaccctcccaagggctcctgtgtaccagcagagaaggcatttccaacaggctgcctctccgagcccagtctaccctctaaggcagccatcacctgtgtcctgctcaccgggcttagggggccaagatagccaaggtcactgggatcctaaggaacagagtgggatttgaaccccaatgtgtctgagcccagaggcactgcctccaccactctctccatctgctggccccaactgctttgcagatgttaccagtgtctaccggttggtaaaggctggctcaaccctggagcatctactgagtgccgtctccaccgcaggggctgggggactcacgggaaagccagacacagtccaactgggaccaatcctggagcatctactgagtgccgtctccaccgcaggggctgggggactcacgggaaagccagacacagtccaactgggaccaaccctggagcatctactgagtgccgtctccacagcaggggctgggggactcacgggaaagccagacacagtccaactgggaccaagggcttctgaggccaccgcacatgctatggttttctgccaggggtacttgcccaggagtcagctctggaaacactttggagctgcttcccaaggccagagcgaaagcctgccccacttctccttcctggagcaaaatctgaatatgtactccctatggagtttgccccaggtgccaggggctgtgctgagccccctcccatggtctcccctgaaagcccgagggaaatgctgtcttcattcccatgctgtcaatgagacaaccatggggaatgagccgtgagcaccaccatctttcttgtcccttcgaacatctccaagtcagataatcataacaatagtggcaggcatcccacattcgtataagctggcagtccgtcctgccttggcccccggcccagttaagcagagggaggtggtgctgtgccctgcatctctatggatggggaaactgaggctcggggctgggaggaggcagatctgagggcttctgagtttctcctcctcctgcagacaaagagagtcacccaaggtcatcagagctgccgcggcggcaaaacaacaatgttctgacttctggtcaggtcctccttccatcacgacgctccagcatgggaggggaggcaggcgtgggggccgtcaggggcctctttaattcatgagttactggcagaagcacaatctccagggaagattgatgaccggctgcaggtattggtgggcggattcataaagctgtcggcagcaggccgtaaatcaaatgaatattcaagattccgcctcaggagcaattccccggctccgacaataacaagatggatgtgggcaggaaggcaggcgtggtggcctcagaagccctcggccctggaatgaggcaccgcacttgctcataacttcagcatctgcctgggaaatctgggcagctcagaagagggaggagagcagatcgtggaccccagacccaaacgcggaccccatgttgaggattatgttttattgaggcatcatttacttgcagtaaaatgcacaggtcttaagtggaacatgggaggagtttggacaactgtgtataatcaccacccagatcaaggtctagaacgccccatcatcaccccagaaagttcccttgtactcttccctgctcaccccccatcctgagccctacgcagccactgctcttcttcctctcactggagcatgtggacttctgtggagggcgtggacttgtctgcctgttttgctcagctttctctgcgtggctgagctgggagcagctccctgtcctgctctgctgcgccgtcccccatggcaagggtctgccgccatggtatgggccattccacccttcatggccacctgggctatttccacttttgcctattctgagaggctgctgtgaattcctgcaagggtttttctgggtgcttttgtttcaggtaaacacctgtgagtgcaagggctgggtcccaaggcagacataggctttaccgttttaaggaactgccagacagatttccaagtgactgtgcctctgcattcctgccagcagcggatgagagttctggcgctctgtcctcatccttgccagcggtgtttatgacacctgttcaggtgagtgcagtggcatctcaccaggagaccgcccccccccaccttttctcaattcaccaagtctccactggtcctgggacacagcctttgctgtcctctcacgagcccttggggaaggcagctcatctttgtggctgagttcaggagccgagtccccacgatctgccctccccaccgggctgccgcgtgttcctggggctgccgaggctgggacccagagctgcctttttaagaaccttcccatggctgcccactgctctcaggatgcaatgcactctccttccggtggtcacgaggcccagtgtcatctgaccctggccacctctctgctgccaccccaggccaccatcctacctgctaaccatgctctgatctactgcctgggatcaggtcccacccaggacctttgtcctggctgttccttctgcctggattccattctccagccccttctgttggcagctgtgtccaggtagaaggaatggctgctgcctctgagagtgatgagcttgctgtgggctaggtgctgggcacggtcaccaggggggtcccatcacgaacctcatccttcagaccaggaaactgaggcccagcaaggtcactggaactgcccaaggtcatgccacaggtcgggggcagagaggagaccagccttcatctcaagcctgtggaatcatcctctcttccggagtggcctggcatcttgtctgggaaggaagctctgggctggccttgggcagaggctagatgatgtgaaatgccagctcctcttgggattcacactcccccagtagggcaaaaagcacactcgtgcctcttcctcttttggagaacatttccccatttcccaactcagcatgaacttctttcctaattctgggccatattgcttcactgccattagcccccaccacagacaagtgttccgtgggatcaggaggctttagaagttaacacaggacagaggtggccagcaccactagggttcccctggtatctggagcccctgtccatcctggtacaagaccagcccccaggactcatcaacatcccagaggtcaaagtctccgcaggtgggacaagctagagcaaatcttgtcccatgtactctagtcccttcgtatgctgttccatccggggcaggctggtgacagaagacacagtgccccccacccagtccaggtagccctgccttctctccccagagccgagagcactaatagccccagttgttgaagaaagggacctgtcccagggtcttcactttgtaggtcctgccagcagccctgatttctatgtacgaatattgctgtcatccatcaactcccctcaaaacaactccccaaaaaacagtcacctcagattccccccgttgaagtaaaagtttcttttcctagacttctaaagtccaagaagggacctcagcaacacaggcacgtctcctgggcagaggcgtgcgtcatggaaaacttggaggctggtgattgggccgtctctgctgcaaagtcaagtccccgaacgcttgaaaaacaacataatgtattcctgtctgcagctctgagcgaaagctcattttgtgtcctgtgtttccatttcctgaggattaataagtgtggaggggaactcgggcttcgtgccgaatatttatttagtcaatatacgcatcaatttagcaaattagagatcgcaagccatttctaagcaatgctgtaaaaataatagctgtactttaaacttgtaatggattttggtttggtgggaggtggtggctactacgtgcctggtacttgataaacaaagaagtttagttctccttaaacttcagtggatgtctgagtcattggagatgtttgtttaaaaagcagacagatcctattgccaagggcacaggctgaggggtctggggtgggggctctggaacacagtgaagagtgggcttccggtgaatggccctgtgtctacctcctggctgtggagggcagggttcctccgcctcggcactgctgtcatgaggggctgtgtgcttctccagtgtgggggctgctctgtgcactagagaatgttcagtctcaccgccatctctgtccactagatgtcagcagcagcagccccctccccagttgcgacgatcagaaatgtctccagacattggcacgtgacccctggcaggcaaaatctaccccagctgagatctactgatgtagtgcagggttctcaggctctctgagcctcatttcttcatggagacacacattctcacaaaaaagccttctaccccacaacccggtgagagcacggctgctgctcacattgcatagctgagaaaactgtggctcagagaggcccagtgacttgcccaggggtacacagcccacccgcagctgacctggggtacgcaaggcacttcctagtccttgaaatgctcagtggccccttctcatccctcgagcctctgtcccaatgtcacctcttcagaagggccctcgctgtctccctgcgctagggtaggctctcacccctgctcttccgatgctctttcttacccctctgccgtgttccccacaggacttggcctagcaagcatcgtgactgcgtgcgtattgacttgtcctcttcactgtcccccactggcatgtgggcccctcaaggtggggggttcctgaacttgctccctgctgtggctccaggccctggcgcagagcagacgaatcatagagcaatcaaatggctcattggaaaggttcccaaggcaaggctgccggctgcaccacaccattcattctccccatattctttgctaacaaggcccctgacttttagctcctggtcatatgggagtgtgaccaagtgctggccagtaagatgtaagtagaagtcttgtgtgaagtctttcaggaagtgtccttacaggaagaagcaaaaccctgcttatcccttcctttttcctgatgactgaaggtgggacatgatggctggagcacaagcagctgccttggacaatgaggcagaagctctgtgttgaggatggagggtcaacacggtagaaggggtctggtctttggtgacttctagaagttgcctgaccacgctgagctgggcttctgttacatgaaggtgaagtcatcttctgtttcatttaagccatgctgcccctgagtctctgctccacgcaccacactgaaccctaaccagtcctctaggctctgagactgcccaggatggaaaagggaacagatgttggttctgcccaggctgttctcaaataagtgggttccatgagtttcttcaattattatagaaggagctcccacttgcactgttgaggctaatctgcccaactcccaaggtcaggggatcactcatgcccctggagtgacaggtgtgggtctgagggtcagagggatgtgaggggaaggaatgagctaggattcaagtcttgaggtaccagatcctggacctgtgctccttagatgacactgctgcctctgactgtcagtcatgcccatccatccatccatccatccatccatccatccatccatccatttcttcattcactcaatgagtgttcacaatatgcttgctaaatgctggggacagggtagtaaacactacagcttgtggaatcctggagtgaaacagactagtaggtggagatagaccatgagccaccagacagagaaacagacatggagattacaaagtgctaggcagggagtcaaaggggagatggaattgaaagtgactggtagggtggcttcagagagaagagatgggaaagtacgctctgatcaggggaggtgaggttgagaagtgaggaagggggtactgagggctatgagagctgggaacggtgccccaggcagagggaagagccggtgcaaaagctctaggctgggggtggcccaggcaggtcaggggatggggaggctggaatgggaggggccgctcttgaaggatttttggtgaggggatcagaccatggggaccctggtcagggaattgtaagaagagcgggtactacacaggctcttacccagtgctttgcatgttgtaactgatatttttggtaccaacttgtgtgccctcaccattcacccagtggtgaccagcagcaaacacctgtcacttcctgggcttggagactttctcagaccactgtagctgctcttcccatgcaccggcaggctgttcacacagtccctggctagaagcatcctgcaatcaatctctgccaagatgggtggataaatactttggctccctcacctcccggctggaataaacttgatctcagggttattaattgtgcactcttcactggctcccaaagttcccaagaaaagttgagcccacagggataacttaccggctaaggtgccctgtgttgctgtctgccttccccttccctggctcactttccctcctcctctgctagggcttcctgggatcgctcatgttcttgtctcctggtctgctcctgggacaacccagtctgagacacagaattagctcatttagtcctcacagtgatcccagagaggaggcactatcattgctcccattgcagagaagaaaatcaaaccgaggtacagagacgttaagtcatttgctccaggacacacaggaaatgacagagctgggacttgagctccatggtggctccgagtctgtgtgttgacccccctgcctgcagcaccgtttatatttggtcctgactatgatttgaagtaggcaggggtttcatgcagaccagcggttcttcagctgtggttcttccccagcgacagcagcagcacctgggaatttgtctgaaagagtgatttgggtggcccacccccagagctcgattctgtgggtcttgaggtgggcccgggaggttctagtgcatgctccagttcgagaaccactggcataggcgagtggtgtagacacgacgtgcgggagaggaatgggaggcagcagaggggtctccatcccagggaagagaggcttcaggggagagaagggggcgcggggggtggaaaggggtcagattcaggccacatttggggttgagccgacagacttggagatggatggggtgttgggggtgaggggaagaaaaaccaaagatgacccctagatgtttggcttctgccagcaagtggatctcagcaccatcctgagtggggaacaccagggaagctggctgggcagggccgaggggtccatgtgaaaatgagggggtggcatgcattcaaggggggctgcccccttgacaattctgctttgcccccctccccaaccctgcattttcccgaggcaagtctctttctgggaacctgactccctctgagaacaggcctggctgagcagcctggggaggagtggttggggcagtagccagggccactgggtggtgtgggggaggggtggtgcacacgctgcaaagtccagtcctgtggcctgtgaagcgagcaacaactgtggtactcggggaacctctgttcctggaaggaatgatcaggcagaggctagctcaccccacaccctggctgtgatgtcctgactccgaaacatctaaagctcagcggggcaaaaaaagatagctgcatttcaccgttgcatttcaaagctttcagacaatggttgccacccaaagatggaagcccccaaggcaggccaccctgctgcgcaaaaagggctttggctgggacaccagtgggctccctgtgaatgttcacaatggagaacagagttatgctaacaccagcaactgatttaaaaagtaggtgattattttaaaatagcattttaaaatattttcatcatttgattgtgtgcagtgttcacatgtctaggaaagcaatctccattacaacacaaggacacacgggcaaggattgggtggtggggaaaggggaatgcttaggacttgcagaaatatggagttcagtggagagctgtagaatggaaaggatctgaagagacgccataccaggcaggaggactgccgcggagaaagggatggcggtgggaatgaccgtgtctggccatcagctggcaaggtggccctccgagctcagtaggagatacctgcgatgggccaggtaaagaagcaggtctgactggaaaggtaggtgcggattcactgagcacaggagtgcgatttctcagggctggcaggtagagaaggaaaacagacacttgtctctggaaggggataaaatctttgattttactcaatctgatccaacatatattaattgtgcacctaccacatataggcacagttgtacacatgaagatacaatggtgaactggacagacatggccctgtccacagagcatacactctgagggtgacagcttagagagcatcacgtgatgttattgtggtgcggcctgacggggtgagggacctaccaaggtcacacagggctggatcagagtcccaggccctgaccgccagctcagtgcctttcagcctgtccttgagcagggactcctgggaacacactgtggatgcaccaggtggccccagtgccctccttggcaacttcaggagagggtagtgaactctctaccctgtggattcttctggaaagaaaagagatgtttccttgctgctggtggaactttaaccataaggaacctacttttctcccatctttctccatacagaaaggggtctcttaatttggggctgaatctcagacagactgaggggagggtgccccccaggcagattgccccttgggcatcctaagtatgtatcctgaattcacaggaggcatgggatgaatttagactaagggtggagaaggcagctgtcagaattttcagcctccttccttggcctgggcaattctgctcagcccaaacttgctcagccaaaccaaagccctttggggcatggctgtacctccttagaagacgtctgaggtggtatgtgctgttgtcttggcacatcttcaggaaagaggcctcatctccagctcaagtaatttatcctggaattccttacaaccacaaacaattgaccctgagaggggctcgaataaatgtgaatttctccatcttatcacactcccacagatgtcttagcaacgaagcagctggggccagggagcatctagactcacttcttaattggtctctcacttaatcctaagccttcagcactttctcgcctgggtgtcccttcttcatgctatgcacatatacaaagccacagagtcatacgatttaggaccggaagggatctttaaaaaataaccaatgtgttttgggtgctacgagccagggactgtgttaaatgctcaaccaggatgagctcatttggcttccactgtgaaactgctgcattagggagctgcccagtccagcctctcagaacacgccacctcagggccacagacacggaaggagcccccaccaccctgcaggccccccccccgcccaccgatttgtcctaaacagccctggtcttttaacgaggcttttgaggttgatgttgcccaacattaagcaggagtgaagaggaagcaagatggaaaaggggcacccactcaagtgagcttggaccctcaagctggccctgcagaccccactatgtcctggggaggcctggcagggggttcagcctcgctgtcttcgggatggtgatagagccacctatactgcatctccagcccttgtaagctctgcccgtgctcttttccctacagccatgggaggtgggggccacctctcatgcccatagctggctcgtggggtcatggtgagaattaaatgagaaaacacatgtggagggcttagcgtggagccctgtgcctggtgagctgtgacaggtgcaagcctctcctgagtcccactttacagatggggaaactgaagccagagaggataagtgaccaagctgggtttatgattggtcctccttacccctgatcccatgctccttgtggactcgaacgctggatgcagcccagaccctgaacatgtgtccagggaatcagggcaccagtaaggaggatgaaaatgaggctgtgcacgccgagacagtggtgttttcccagcatgccccattaaggaggggctatcagtgctttccctgtataaatggggagaccagacctttgcctgaggccacacagggaggcaggatttgaattcaggtctctcaaacagcagagcatgagtgcttaacaaccacacactaccgcccctactgcttccttctcacaggcagaaagccaagatccccctgaagcaggcgcccaaaggctgcaccgtttctgctgacacccccatgacacacctggaggtggccacggttgaggctgttggtggccggggtgtgtcatggggagcataaggaccccacagttgcactgcccaggctggcatcctgcacagccacttgccacctgtgtgatcccagcctgtgtctgctgctgtgaacctggctcagagttggataagcagaggagagcaccatggcacggctgggattgacccagccagtgtggctcttggtccatcccagcttcttgctgcccactgcctccaggtcaagcatgtaaggctcttagcactgctgggcacacagcaggttcctcacaggccccactcctgctgtgtgccatggccacccccactgcccaccctctgctctgggctgtgttctgaccagggcctggctcgccaggcgagaggaggtatccagggcagaggtaccacgtctgggggagtggccctctgtgagcccctggcctgctgggctcctggcctgcaagtagccccctcccccaggaatgcctccagatttaaacacacccatgtgctgagaaaaataccagtccccctgcccccagtgagcgccatccagcactggggattttgctgtcccggcagtgggggtgtcccctgtgtgtccccttcaacaaccacctccctctcaggtggctttgcaaggccttgtttttccggaccaaagtcctgagcagaggggaagagcttagatggggtggggctgctcccagctaacccatagccagagtctctgagagctggaagtttccagcaagagatccagcccgagctggctccgttaatcattctccgtggattcgggacttggcctggatggagttttcaggccacaggacggcctgggttgagcacgaggatggcacaaacattccaatgggggtgttctggtgacctgcccagggaaggggcaggggcagcggtggggagagcgaatgcccaccctgtggctggacgtagccaagggaggccctgctgtgatgctagaggagtggtcccctgggcttgcccacacctccttccccatgttccttccagagccagaggggtgggatgggataagacgagaaatggggctgggaaattgaagctggacagcgcagagacgccctcctgcagcccatagagcagacttctgtgtgttcctaaacaccctgcgcaccttgcggagtggaccatgctggattcaaacatgagaaagaaaagagaagcatggtaacaggtgcatgagatcaacaaggagaggctcatgcctactgggcactcactgcatgccaggcacggtgccctgcgcccaggagccacctgtctaatgctcccgacacgcgagcagtaaggactgtcactgtgtccacttctgagggggaacactgaggctctgtcaggttagatccttgtccaggccccatggtaggaaatggcagaggaggctggacctacctccaagccaggtgtgggacaggcctgggtggagaggggtgaggtgcacgtgtcccctcagagaccctggtccaacagccagttccccgtgatgtggtgtaggagtggctggaaactcttagatcctgggatcacagaccccaaggccaggacgaagacctactgccaccagctggagtggaggggacatcactgggagggaccctgggcagtgggtgcagtgtggccccatgaaggcccggtggggaccaagccgggcaggcagctgcacccactgactcctctgcctttccctctgttttgttctgtcctctttcacagggacacccacagcctctgtcgctccaggcccatgtctgcccaacacagctgcctccaactgagcagctcttctgtggggccggggcggttctcctaggagagcagcctacgctacaggcccatgagcaaagtttgctgggaagagggcacctgaaagaggcctgggggcctgagggcatgagcgtgtgaagaagtgggaagggagctccatgagagggaacagcattatagaggggttcagaggcaagggccaggccaagtgcgcctggaactggctgcacgggtgcatctggtgtgctgagttttggctggggagcaggaggaggaggaagaggaagagcggtcggagggccgggtctggctaactgagggctgagttcaggagttcagtgttctgatcctgggggcaatagggagccactgaaggttggggccagggagtaacaggactagagttgtagctcccagggtcccctggatgctgagagaatggacagaggggccagagggacatgggaggccagtggggagattccttccatagccaagagagacgtggtggcttggctggaggtggttttggaagtggggagaatgggttaatggaggattctaaaagtgggttttgatgggaccctccccaaggaggcttcaccagaagcagagatctgcctgggtcccaagagaagacgtggggagcagggcttgggacactaccctgctgctggggcgccgggagggggcctgtcgcgcttctcattgctctgagcgctcctgccccctctttggggagacaggctcttcccatctcaccaaggagtggctggaagccctcagagcaatgagaagggcaaggaggacatgggagctgcactgggccttgcccatcccccaccaggggaggacaagctggcggggaaggagtgggccagcctggaggcccctctggatgtgcaggctgggattgaggttcaggatttggggtgggggcagaaaggtggtttcgtctggaccttgacagtcagcagaggaggtgggagggagcttgtcacttccagccccatcctgcagcccctcatgtctggcagaaagtctctggacggtctatgacacctccagccttggccttaggtatcctctgtccaaaactggaatcagccagaaaaatcaatgcttaatctggtgacttcaagaggaacatcggccaccacctcggaacctggacccagacctgggtttttgtaaataccccggcttggagtgaagtccttgttcaaagtcccccactggttagtgggattcaaaccccagctgaggtccagagatcgtgcacttggttctgcgtgggggtgcgtggcagcccaggaagtgggttcagaggctgtggggcttaccgggcaccttgatctttccggacccaactgtggcccccagggaatccgagatgcatcctggctgccatggccctggtccaggaatcacagtgggctggggggatgggaccggcctggctgggcacaggggccagagaaaggaagggaagagatggcacccaggggccgccagctgagggcacaaaggtgagaggacaccgggccttggggagctcatggtgcagtgggagaacaagcgggatgagggtccccatgacaaaagcagaaacccaggctcggagggtggcttgcaggcaggtggcagagcagggatgcgaagccgggcgagcctgctgcagctgccacctctttgggtgggagcgtgcctcactcgagggcttgctctctgtgtgaggctttttcttgtccaacaaacactcacttgctgtgtgtcaggcctgtccaagcgtgacaggtgtccactccctaaaacccccataataactctgcgaggtcagtgctgatgggaaaccaggcacggggtgggtgggcacctgcccagagccaagcagcctgggagagggctcagctacccagacagctctgccgcagaacaaggaggaccaggaggcctcgatttacccttcagccccgggtcccacaaagggccaaggtcaggaactgccccttctctgttcttaatctcaccccaggacctgggccaagtaagaggtgagtccccaaggctgccagccacagcctgtgtcagagcctcctggggaggggctgctgaacccctggtcacacccaacttccccgcacagcgcctgggggcggggccttggagctgtgatttgcatccagctccttggcagatgtcagccaccactcacactagggtcttagtgcaggcctggcccccggaatggtgctgctcgtttgagaagacacgagtgtctcaagcagaacacgaggggcccatgagatgtggggtagagtttacaggacacagagagaaactccgactcagggaaaggcccgggagggctacagggaggaggaggagggcaatgggccaagttaagaggcaggacatccaggcagaaggcactgactgaacggaggccgggaggctggagaggggtgttcctagctgcagtaattagatccttggagcaaacgaggaagaaggtgtaagaaaaggaagatgcgtgggtcgggccagatcttgaaaggccccaagggacaggttaatcggccaggtttccacacccactgggcatcagagtcacctgtgggagttcattccttcactcattcaagaggtgcatattgagtgctactgtgggccagacatagttctcagccctggggagcccgtggggaactgactgatgagacccctaccctggtggagacaggagtgtcatcagaggacagagactgtaattaaagaaataggaaataaaataatggcagatccctctgagtgctcacaagcagatagaccaggacacagtagagagcgcctgggctgggagaggggtcgtttgaaccgagtccccgaggtgagccagaggagaggtctcagaagtgggtgggaagcctccagaacagatggaccctggcagcccctgcagggactggacccaaagcctctgaaggacgcattgaggccatcacctctgggcagacgggcatgcgcagagcatcacctgtgctccgcagacgaacggcctgacttgggatttgagggtctgcagagatggggtgggtgtagggggtctcagaatcagaaactctgaccctggatgggacctcggggaccagcccctggtccaggggtctggaaccgaattgaggcagagggcggcatccttgcccccgcgccctcctgccctgcgaattctgtgggcctttttttttttttgcaaaaacagatcaagggcgccacctggtggctagagctgaggccgtggccgcttcagcccaggccggggtccacggtggccaaggctcagtaggccggtccctttaggtcacttccgattttgtagatgtttgtggttacacaattaatatgtttaccttgcagatacagtagaaaacccagataaagccaaaagaaagcaaccacctggaatttcgcacccagaacaaacctttcttcacatgtgcacggatttctttctagacttttcttcatccatccaggcattttcatacaaaaagtgaatcataccccacagagagtctgcaacctgccgagctgtttcccactcaccgctagatcgtggctctctttcgtgccaatgaatatacttttacaacatcattcctgcagctgtgcacgcactttgggtgtggccagaaagtgattgaggtcgactgagcccctgtaggttggatttctttggagcaaagtgagttttccagagttttttcattttgtttttgcctcccttggggaagacaggaacttcaaagccctcatttctctggtgcaaaacgggttttgacaaatccacatttaggggtaaacttcatggtgccagccccccgcctccctgtgtctgaagctgggagcataggggcacttgctactcaccctgtgaactgcccggggcccctcttggagcctgagggtttggtttacactgcctgaaatggacgcacgggcaggtcatatgcttcacagggctgttttgtgttcaacaggtggtctttgtaaagcactccacgcagggctcggcctgtggtcagcccttggtaactgtcagctttgttaccattcaaaggaccacagggtgtgggacaagagcactgcggccccccaggcctgtgctctcgtcaccggctgcaggatgggggcctgttctcgtcacctgccgaagggctgaaatgcctccttgggggtcatggtggggcctgacttattgggtgccgagttagatcaccctttgctattcatgaggctgtggctgtgccaggaaccacgggcgctgtgacaacacagccacgtcccctgacacccactgacgtcccctgctctggggctctccaccgatgatctcatttaaccccgttttgcggatgggaaaactgagactcagggattcaatgacacttgtaacatctcacacctggtcagtggcggagccctctggggcccaggcctggctgccactcggggaggtcttgttgggggcctctttcctttgtcagtgactccaggacctctgggcagagtgggaggaggtgacattcagcagagtgtggccgtggtgctgtgtgtgtgagatgggaagcagttgccctgtctggaggcctgggccctacctgggcactgagctgtgtgtatgtgtgtgtggtgcacgctggtggggggtgctgaggttcaaggtagcgggtcacttgggcatgtcacagcacagagggtaaacccgctgtccaccaggcttggggcagatatggcttctgaatccatcctacctgagcacattgtcagactcaaacaaggagctagactaggagtcagagaaggaggggccagatggagagaagggggtggctcaggatggggcgtggtgagggaccattacccacagcactgatgcggccgcaccaacgaggcaggcccctgctagtttcatcctgaacacagatgatcaccccattttgcacatgtggaaacggaggcgcaggaggactaggtacttgcccaaggtcacacagctagaaaatggttgggcaaaaccttgagtctggggtggtccaagtttgtatctttggccctacactgttgtgtagacctgggaggcatccacccacttggtgagccagagaggggcctgtgggctgactgtaagctcaaatgggccctctcttcaggtcctgcaaatgaggcaccgccccacctccctacctcccagacaggggttgatgatgtgggttttcttccacacttggaggtcgactgtactcattttgtgccctgggtttaatcctagagggccattcactggctgtgtgaccttgggcaagtagcttaacctctctgtgcctcagttttctccatgtgaaacggggtaaagattcctttcttcgtggagtcggtgggaggatgaagtgagttagtgcctgcgggagtccggggggcatcagctcccgcagggtcgggacttcgatgccacagatgggcttgcaggtagggtccttgggagtcacgcaggagctggactggggacttgagcgggggtacccaggttgcaggggtgttccccacgatagaagaaaatcagcctctgaagggtgctgggtttgtgctccttcccccaaatttggggcacgggcatcagccagaaaggagcccgcccccggcccgggagggcagaacaggaactttcacctggggcctgtggaccggctgcaggcttatgtgcaccaccccggaaccgtgggggaaacacgtgtgtctggctgctttgtggggaaggaacaggagggggtcacacgggatcccccccaccccgcctgaccccacctcaggccctggaagtttccgagcccagcctggtgagcggcggccggcggcgtgcggccagcagagggcgctcgggccaaggctgtgaaaggccggctccgcgctcctcccctccaggccgcccctgcagtcgagacctgcggagggcgcgggcgggggctggcttggccctaactctccgggagcccgggtggggccgctggggtcacagctggggccacagctggaagccggcccagacatctcagcccggggcgggtgtcacaggggaaattttgacaatttcccggcctagccccacctgtacagacggctgtcaatcaatccccgggagggcctaggcttcagcccccaggtctgggcaccactgggcaagggctcccttcattcttagcgtgagctcccaccaggcagggtctgtccctatttctgcccatttaacagagtaggaaactgaggctcagaggtggcaggacttgcctgagattacactcacttgcctgggattacacacaccaggggctgtgacgccaagccccattatttttttccccatttattcttttatattcgtgatattaacagcagcagcagcgcctgtaacggaccttctcagtctgggccttgctggcactctgggctagatgtctgtgttaggggcatggggtgcgctgagcgttgaagggcatggggtagcctgcacattgaagcatgctcagcagtgcgggctgtgtgaggctccccaggacgatgcccgtgttctaatcccagaacctggaacatgttaccttacatggagaaacagactttgcagaggtgattaagttaaagatagtgaggtggggggtcatcctgcattatcagggtggcctcgatgtcatcacaggggtccatctaagaggaaggaggaggtgagagggaaagacagaggttcagagccggtaagccagatgctgggggcagagaggagtcacacaaatggggggatcaaagattcacctccaggatctcccagccacgcagttcaccccccacacccctgacctgcaggtggagctgggagggccaggcctgtctcgagctctgtagccaggggcgccagaccccctcccccctttccccacccccggccccccagctgacactcccgccttcagggctttgccggcactggccctgctggattgcttctccagcagctgggggcattcagctgattgtggcaaaggccactgtgccccggggtgggcgtggggggcaggtcaatgagacacagtgggggagctgaccagccaggggctgggaggtgacagccaggccgcggtgatatgtcccaggcagctttttcagtaacatgtttaagagcactggcttgcaagcctgcctgatggctgggtttgaatcctatctctgtccttgggcagtagtttcacctccctgagtgggtttgaatcctatctctgtccttgagcagtagtttcacctccctgaatgggctgccttggaatcatgcagcgggggctgcatcatgctgcgtatccacaactgtccaaggaacccttgtttcacaggagctcttgcagaagagggttttcatggaatgcaaaatcctggtcctgctggcccctccccatctgaggtgatgtggctgcccgtgggtgggtgccagtctgctgtcatccgtgggagctagcagcctggcagatgggagtgttaaatcctccgtgatgggttgaccaccaggactggaaaaatctggttttcaatctggaattttgaacatgggtctcacttgtcagccatgtggctttgggcaagccacttaccctcccttggccccagtctcctcatgtacttaaggggaggattaaagaatgcttagaaaatgcccttgtcacagaaggtccacaccattctaagcacccccaaattcaggggtgagcctggattggctacagctaatgactctcatccccatgcccaattggaggtggcaaatactggggtggtttagaaattgcttttgtcccctgtgggaatgtgaggtctggaaccactgcagccattttgtccccagcagggcagaactcttagtggctggaaagtctccgtgtggagcctgaaaaagctgagtctgtgggaagccatgaagagagatggagggacagtgggtcctgaaccacattgtttgagctgctggatgaggccttacctgaacactgctagtttgtgagtcaataagcacgctaaaaaaaaaacaacaaaaaaacctgctttttgttttgattcaaaagtacaaatagatctgcaacatcccacctacaatattgaacagatgcctaaacatacagtcgtcccccagtatccccaggggattggctccaggactccctgtgggtacaaaatccatggatactcaagtccctgatatgagatgatatagtatttgcatataacctatgcacatcctcctgtatactttaaatcatctctagattacttataatacctaaaacaatgtgaatgctatgtaaatagttgttatactgtatcatttagggaataatgacaaaaaagtccacacgtgtttagtacagatgcagtcatcttgtttttcagatattttcgatcctcagaacccacacatacataaccgactgtatttttaaaaatcttattggtttcatttttcccacttgaaaattttttcccacattcactcagccttccattccaggccagacccagtggcttcataggttttctgtgcagtatcaggcttcagattctcacaactccccatgcagggttttgttttgtttttttttttttttttgagccttcggtggctggggccctgtggagagagactcatcagagagcagagagctggagagaaagaagcctgaaaggaaggcttgagcctctggatccaaccattcctgaacatgagtgtcccttgattccccagttgcatgagcaaatacattcaccattgtgcctgagcctggggagctaggcttcggccattcaaagccaaaatgcccgtgagtccctctgtagactcttcttcctgctctaagcatccaattttggttgcctggtaaaatctcacaagtgaggagtcctgtctggggtcacccagagaggaggagagcagctggaatgagaacataaaattgcatctgtgagcaggttggtggtttcagaaaatcatttccaactcctggagcaaattcctcctccctgcatcgagttctgggggctacaagctccgtttgcacacaccatggcagaagggaggggtgggtgggcgggctagacacagcgcgggctgaggggtggatggacttaatcattctctgcttttaatggtatctagttaatttccttcccaaggagactaacattgaccttcacctctggcccccattaactgctagcaatgctttgtcagcgtatttatgacaaattaattacacagggaaaatcttgctgggaaaatgagtattctgattcagcctgggggtggaagctgcattttgattcctcattgacagggggcctggttatccacaaagtttggccaaacttggaggcaagcaactgatttgcagctccatgcagcaggaagacacgcccagaaagatagacaaaccccattctcatcccctcctgcctagtgactcatgtttgcaaactgggtactctatgagaaaatactctggggatcccagatcagcatggtggttgagataactttgcctacagtatggctgagcagctccagtccatgggacaagacaccctatcccccagagtcaatccaatggctgtaccgaccttgttgcctaggtctgcccagtcctccctgtgggctggcttgtacagcagtgtctggtccaaactcccaagcggccatggtctggtccccacctgcctccgcagccagcctccctccactcttctttgtgctgggctctccggcaatacccaaaccacggtggttctctgaataactcagctggttctgatcttcatggctttactccagctgtggcctgcctagagcaccatttccaccctacgcagcctcctccctctgcctggtcttgaaaaatgtgctcttgagagttccctcctcctccaggaagccttctggacccctctaggctgtgtctgggcccctgtcccacactcccatgattccctgtgatggttcctgctctgaactccctgcctgtgtacgttcccctcctgactcactgtgagccactatcaatgacagggctttgtctcccactctcagtagcccaagggcccagcacaggagttagcctgcaggatgtggtcagtgaagggccttgtccagcatacattggaccctggaggtataagagttgaaagccagggcccctgagtccagtaaattcctcattcaaagctggggagtgtagcggacttctgaggttctagcctgtccagcatccctttcctggtaaatttagaaaacagctgatccatcacccttaggccatgtgactgggggtggctgctccccatcctggttccagagataagctatgtgataccagttggccaatcaccgcattctattgctctggccaatgactggtggggaatgggcatacaaataaagccatctgttgtggcttttgctgtcgggaaagtcatccctctccactgggtagctaagctagtggtgtgggggcctggagctgctgggggctatcattgaaaacagaggaaagcagtaggggggtggagcgaggctgagttctaagagatcacctgagctcctggatctagacattcctgaagcaggctctatgcctgggcttgtctattagaagatccagtgcatccccttttgtgctgaagcaggtctcagctttctatcatctacgaccaaatgagtctcgatggacgagagctagactaatgacaaggcaatgttggggcaatgaagtgtgggtttgatatggggagcagaggaggcttcagaagcagacaggaggcatccagctagcctgggagctctgaaatctctcggtaaggtcatgcctcaggttgagtagcagtgagctaaggggagtgggtaggggaggtgagggggcagctgcccttcagaaatggaaatcccagtggagctggcttcagcactaaggggacatctcagttcttctaatgggtaagtgctaggataggttctgcttcaggaatgactggatcaaggagctcaaacaatgtcttacgaatcccctttaagggatgaactgtaagttctatatatcagtctaggttctgaccaatatgtcaaagcatccaccctaaagatcctcccagtcgagttgggcaaggagatatgaatttgttcaataactgtttttactgaggccctgtgatgagccagcccctccccgccaaggtagacattagccccaggggcatcagcttttgggtgtcagatgccaaggccagtgaaggagacagagtggagtgtgacaaacgcccacctgaggactgggtgtggcattggagttgggggcagcagagtgcctgtgtgtgtgcatgtgtgtgtgtacacctgtgtgtgcatgtgtgtgtgcctatgtgcacactgaaggacggacacagtccttgttccacaatcaccctgcccagctgatcaccacctccctctatccctctccatcttcctcccaccatgccccaccaaatccctccactacccaccccaccccatggttcaagaaatgttgcagagcccatagcccttctacgggaacttagcccctagcggggtggtggggtctggtaaataacaagctgacatggttttgctgtgtccccacccaaatctcatcttgaattgtagctcccataattcccatgtgttgtgggagagactcagcaggagataattgaatcatggggatggttcccccatactgttctcctggtagtgaagtaagtcttatgagatctgatggctccataagggaagccactttcccttggctctcattctctctcttgcctgctgccatgtaagacgtgcctttcgccttccaccgtgattgtgaggcctccccagccacgtggaagtgtgagtccgttaaacttctttttgcctataaattaccccgtcttgggtatatctttatcggcagcgtgaaaatgggctaatccacaagcactccctgctgattggccagaagaggtcacctgacccatgggtcagccaatgacttccaccagggcctggggacccagggtcggggtgggaaagaattttctctttgggagtccagctaaaagatcctgagagatcaaggctgaggagagaagattctagaaaggtcgggtgataaggaggtcaggtggccacaatgggccttgaggaagtgagacctcaggtgaggagagagtggggcagtgtttcagttggctcaggctgctataaaaaaatgcctcaccctgggtaatttataagcaacaggaatttattgcttacagtttcggggtctgggaaggccaagatcaaggtgccagcagagtcagtgtctgatgaggggttggtctcggctttaaggatggcactttgttactgcatcctcacatggcggacaggcaagcgggactaacaggctccctcaagccctttcatggcagcgctaatcccacaatcccactcgccctcctgactccatcccctccaaaaggccccatctcttcataccactgcactggggattatggttggtttattttttatttatgtatttatttttttgagacggagtctcgctctgtcgcccagcctggagtgcagtggcgcgatctcggctcactggaagctccacctcccgggttcacaccattctcctccctcagcctccggagtagctgggactccaggtgcccgccacaacgcccggctaattttttgtatttttttttttagtagagacggggtttcaccatgttagccaggacggtctggatttcctgacctattgatccgcccgcctcggcctcccaaagtgctgggattacaggcgtgagccactgcacccagttgggattatgttttgatatgaattttgttgggactcaaacattcaaaccacagcaggtagccatgatggaaggtaactccaggcagatgccccgagcccaggaaagagtggagagagtcccctgggcctgggggaccgagccccactcccatctacccacctcctcttggcacaccaaaggttccccaaggcaactccctgtcatctactcctggccatcaaaagacctggcctgaacccatccccatgccaggtccattcccccaaaactgattcatgcaggttatgtctggaagcaagcaggtcaaacaagacgctaaggaatgcagagagcagcaggctagtctccctagcatgcgcccacccccagcctgtgtccaagccccacgtgaggctgtgcactaaatcccacctccccaccagctcccctcgtgtgaggcttcatccacatagtggctgccttctgcagctttgtgactcctgtttccaagagtcatagtttccagcttgggggtgagcttcgagtggctgggagtgatgggctgaccaatgtctcgaggaaagtgacttctggattgtgtgtctgcgggacgacgacctagggaagagaagatgggggatcagcttcatgggcacgtggcctgggcatttccacagggacccgctcttggaaggatttcgagctcagcttgagcctttgttgttactgtctttagatttgtacaaagtcttgaacagggagccccaccttttcactttgcactgggcccccagatcatgtagccagtcctgtcctagtttcacagcagtgagatggaggagcagaaataacaccagaaagcccccatcccagggctctcccagtcctcccagggaccccaaaagacggctctacatgctctggcactgacagtctctgattagcaatttcctcaaacaaaacaaaacaaaacaaaacaaaacaaaacaaaaaccattccaggccttacacatctcaggataaggtcccgcccgccactcaaggaggaagtgacaggcagacctcattttatctcactttaccttattgtactttggtttattacacttcatagatattgcactcatttttcacaagttgaaggtttgtggcaccctgtgtgaagcgagtctatcagtgccaatttttccagcagcatatgctcacttcctgtctctgcgtcacattttggtaatcctcacaatatttcacactttttcattttgattatatgtgttatggtgatctgtgaccagtgatctttgatgttgctattataattgctttgctttggggtgccacaaatatcacctgtagaagatgacgaagttaattaataaatctgtgtgctctaacctgtcactgatcagccatctcctcctctctctccctctcctcaggcctccctattccttgaagacacaacaatattgaaattaggaaaattcataaccctacaatgggccgggcgccgtgggtcacacctagaatcccaacactttgggaggctgaggtgggcagatcacctgaggttgggagttcaagaccagcctgacctacatggagaaaccccatctctactaaaaatacaaagttagccaggcgtggtggtgcaggtctgtaatcacagcgacccaggaggctgaagcaaaagaatcccttgaacctgggaggtggaggttgcagtgagccaagattgtgccattgcactccagcctagacaacgagagcaaaactccatctcaaaaataaataaataaataaataaataaccccaaacggcctctatgtgctaaagtgaaaggaagagttgcacgtctctcactttaaatcaaaagtgagaaatgattaagcttggtgagggaggcatgtccaaagctaagacaagttgaaagctaggtcaaaagttagccaaattgtgaaggcaaaggaaagggtcttgaaggatattaaaagtcttacttcagcaaacacatgagtgatgagaaagtgaaccagccttgtggctagtgtggagaaagttttagtggtctggatagaggatcgagccagctacaacaatctcttaaacctaagcctcgtctagggcaaggcccttgctctattcaattctaaaggctgagagaggtgaggaagctgcagaagaatagttggaagtgagcagaggttggttcatgaggtttaaggaaagaaaccgtccccataacatgcaagtgtgaggtgaagcagcaagtgctgatggagaagctgcagcaggttacccggaagctctagctaagatcattgatgagcgtgactacacaacagagcaggttcttaatgtagatgaaacagccttctattgaaaaaagatgtcatctagaactttcataactcgaaaggagatgtcaatgcctggcttcaaagcttcaaaggggacaggctctcttgttggagattaatgtagctggtgactttcagctgaagcctctcctcaattaccattttggaaattctagggcccttaagaatgatgctaaatcgactctgcctatgttctatgaatgaagcaacaaagctagatgagagcacctgtatatagcttggtttactgaatattttaagcctagcattgagacttactgcttagaaaacaaaatattcctttgaacatttcactgctcatcgtccataccacaggatctgagtgttccgcatcctggattgagggccaaaaaaaaattttttttttactactcgttgacaatgcacctgttcatccacgggctctgatggagatgtaaaaaagaattaacattgttttcatgcctgctagcacagcatccattctgcagcccatggattaaggagtaacttcaacattcacttcttattcttcaataaatatattttatgagggcataagtgcaacacagagtgattcctcagatggatctgggcaaagtaagttgaaaatcttctggaaaagatcaccaatctacatgccgttaagaacatttgtgattcatgggaggaggtcaaactatcaacattcacaggagtctggaagaagttgattccaaatttcatgaatgactttgaggggttcaagacttcagtgaaggcagcaactgcaaatgtggtggaaatagcaggaaaacacaaattagaagtggaatatgaagatgggactgaattgctgcaatctcatgagaaagcttgaacagatgagttgcttcttatggatgagcaaagaaagtggtttcttgagatggcatctattcctggtgaagatactgcgaacattcttgaaatgacaacaaaggatttagactgctatataaacctagttggtaaagcagcagcagggttggggagtcttggttccaattttgaaagaagttctagtatgagtaaaatgccatcaaacagcattgcatgctacagagaaagctttcatgaaaggaagagttcattgctgcagcgaacttcattgttgccttattttaagaaattgccacagctgcctccaccttcagcaaccaccaccctgatcagtcagcagccatcaacatcaaggcaagacctccaccagcatagagatgatgactggcagaagacaggtgatggttagcatttttagcaataaagtattttaaaattaaggtatgtacattgttttttagatataacgtgattcagtgcacacctaatagactagagcatcgtgtgaatataacttgtatatgcactgggaaatcaaaaatttgcatgacttgctttattggggtgttctggaactcacccataatatctctgagctatgcctattgatgtctcttggggacaaagagaggtgggtgggtcagggcaaggggcaaagatgtcatcagctcttctgctagaaccttagggaagaatgtcaggatgttgcagggcaaatctgggagtgtgaccattttttttttttgagacagagtcttgctctgtcgcccaggctggagtgcagtggcatgatcttggctcactgcaagctccgcctcccaggtttacgccattctcctgcctcagcctcctgagtagctgggactacatgtgcccgccaccatgcctggctaattttttgtattttttagtagagagagggtttcaccgtgttagccaggatggtctcgatctcctgacctcgtgatccacctgcctcggcctcccaaagtgctgggattacaggcatgagccactacacccagaagtgtggctatttttaaaaaacacagtgctgtgttctttccggaaagagaagtcttcaatggtctggcttgagacccacagggctctgcagacagcctgtgctgtggggtcctaagccggatccccatctggtggcacatgccctcccaagggtccccagtggccttggaggtctcagagactccctttgctgctggaaggaagtccatgctcccagatgctcatggcctgagtcctgaggaatgcgctcctggtccccgttctgcaggtgtcacatgtgcatggggctcccaggggtcctggagggagagtttgaagacacgtggggccagggtctcctcagttgctgggacagcaaggacacggcccttggggtgaggagaccctctggacttccaggacatgcatcccctgggccttcaggcactggagggtggatgccggccagtcctccagattccgtgaatccatgttttctacccattggtgggactgggtgtgattccttattccagatcccaaaagggtaggagcggaaatccgccttctaattcttttttcacatgggaggcaaaaatctcatccagcccctctcctgctcaaagccccccatggcttccaattgccttagcatcgactgcagcctggagccaggccctggctctgctctccatgctcaggtcaccctcaaacccctgtgggttcccacactgtcatgtcctcacctccaggccattgtccacactgttccacccaccaggtacacctgccctggccctccccaccttgcgtggacctgcccaactctccagctgcccccacccgaggccccgagctcccttctgcagagttggaatcctcaggctctgcaaccagcctgtgcagcttccagggaccaaacggtggctgggacggtgaaccgcactggtttcccctctcccctcttcctgttggcagtggagccccctcccctgagtctctgctgggcttagactgccttgacacaggcggcacttcccagaccccccgtggctaagtgcaggccctcagaacagcacagatgcagtgggtgggcttggtcaaagacaacagcggctctctgtaccctctctcgcccctctgcttgctggtgctaagttcaaccccacagatgaggacggagcccaagggacgactcagcactgaggtaaaagaaaccctggtctgctaccctcacccggacatgagacttgggcttcaagcaggcggggccaccgtgtgtggcatctccactgcagcaggtcagcctgtgccctgatgcagaaccttatttgcatggcaacccagcacctctctcgggcccaaaacaatcaccacaacaatgatgagacaataacactcctatctcctgaatgctggcagggctggtgtagggctgagcttcgccttcagattttaccccagtcttgcaaccactgtaggagttgcttcaggctattcttgccatcccactttacagctaaggagacagaggctcctgggtgaaatgacttgggtgggtccctccactagggggacggagcctccacgctgactctagagctgctgctcctcgctgtgggtgggcacagcctccagactccgggaaaccagagattagcgaatgatcgatgagagtgaatgaatgaatgagtggaaggtggggagagagagagaacacacaggggtccactctgccccctagctcacctgcgtcctcccctggctccccctctccagaccctgcgactcctcctgggccagccacccctgggctgatagacattttgttgctgttgccgatggtggcgtcctcgagaaagcacgatttcatgtggattctctgggcggcttccccctcagggtgagttcctggactgggaattcttgcttcaaacgaagcttctgggccggcagcagtggcagagactgtgggtcaaagggagagaggcctggagccaggagcagctggacagtggccgggaaccctgacccccagcctggttcaccctcctccccagatctcccaccagtggcccacaccatcccaggagcacagcctgtgcctgcccgccacacctccacccgccacacctccgctcgtgctgttgtgctgtctgggaagcgtctttctgctccactgatcccgcagtgggtctgccccactgatcccgcccggctgatctggacgtcagtgtcttcctctgggattcagctcctctctcctctgctgcctgcttcccactgcactggaacactggcccccacttttggttgaaatcttatgggggctcccagcctggccccagctcctgccatctggctctgccctttcccacccaaacttctgaagaatcatccacactgagtcccgccccctccacccccgagacctcttctgctccctggcccccagaaaccaccccctcaaggttaccacgatccctctcgctgaaccccacagatgcttccctggtctcaccagcctggcccctctctggagactcctttcccggggcctctgctttcctcctccctctctggcttctctgctggttcttctcccccagcccatctctgcattcccagtgtgggggaggcctctgcctggggccctctggtcactgcagccacagctcctagtacggcacctgtcttccatcctccctaaacaccattccagtctcaaaccatcaccctgctccagttggcccagcctctgcttctctgctcattttacaaatgaggaaactgaggtttcctgcagtgggtcgtaggggatggggatccagagtgctagctttattttattcatttatttattgagatggagtctcactctgtcacccagactggagtgcagtggtgcgatctccgtttactgcaacctctgcctcccaggttcaagcaattctcctacctcagccttccgagtggctaggactacaggcgcaagccaccatgcccggttaattttttttttttttttttttgtatttttgatagagacgttttaccatattggtcaggctggtctcgaactcctgacctcaggtgatccacccgctttggcttcccaaagtgctacgattacaggtgtgagctcccgcgcccagcctagagtgctagctttaaaagccccacctgctctactctggttcagctgcctggtggaaggaaaggaatttcccatcatgcttctcttcccaaaaagattctggctccagttccttccagtgaggacccacggggtggcagagttgggtctggcctctagatcccagttacctggggggctgccaggggggatgtgggcagggccctcggacgggacgccgtggagcctcatctcattgctgtgtcccagctgcacccgtctcagtatggactgctccatgtggatgtcctggggcccccagggatcaactagggtcccccaagttgaggaatcacctggtgccattgaagggaggtggcgtggaccggcggaacctggcaggggacagtggcacagcctcaccggagattactgcaggcttcttcctttccctcaccaccacacgcaggcctgtcctctgaattcttcctggacaccatcgaactggcggccaaagacttcaggctctggcttagagagcaagaggacctggcggaatagctcattttggggctccctgagttctcaggagcggggctggtcctgggtgttgcagggacactcacaaacccaaacaatgagctccttgttctgattcccagtcactcccgagccttctgacctcatggggaccaagtctcgtttggtgccaacaccaaaggctcagagcctcccgcagtgttttaactgccagggacaacatttatttttatggtgtttttcatgatttacacttaaaataatactataaaattgttttaaaataaatttttaaaaaggtgcactactcaacaacattaattaaataatcagacatgggtatggccagaatcaggaaggtggggctcagaagattaaagctagggaaaccatgatctagattctagaacaaggttcctcatttcacaactgaggctgacagtggggaaaggttctcccaaggttacagggagtgtcccgactttggggctgatgctgtcactcacaggtgacaaggctgggctgacaggtggctctgtcccctcttgccacagtgcccggcacagggtaagtgctcaaagtgcaacaccgcatttcatccaaactaggatgccacaggtggtgagatgcaccccagtttccagcctgttaaaatgtgggggaaagtagcgtgtctcagaacaaatacggtactacaataacctcccctgtagcattccgcggagggaaaggcaattgagttgtttctcatgaaaaacaccggaccccattgaaaatgaggcataaggtcaggcgcaacacagagataccccatcttaattttaaaattttattagaaaaataaaaattaaattaaactttaaaatgaggtagaaagtatcagagtacagggaaatcaggagagctttgatccaggtgtcctcattctcaggacggccgtaaaggtggactgtgggggtctggaagcaaccctttccccttggagggcagaatccccccactccccatccctaccctttgcccccacccagaggatccggtggctccccaccgaggtcccctccctgggctctcttgggtgacttaccgtcctccctggagactgtctgtcttgtaatgatgttcccgtgtccaatctggatggcttcggagtttgcaatggaaatccagctgttgggtccattctggcagatcatgttgattggattgtgctggtaaataattgaggctgactttgctcttcttccagaatcttctgcaaaataatattcaactgtatccctttgccactgtctatgggtcaggggttcccaataccagtcggcagcaccaaattctcctggggagcttgttaaaataccctgggcgttccgagtcagtagggccaagtgggaggccagagctgggtgtttaacagacaccacaggtacctcagagggagcctcacttgaaaatagccactgtgagtcaccctacctgtgtcttttgctgcctccatggctgggccgccatgattgctggctgggaggaccgcaggggccccacactgctctccctagggggcagccacagcccggacccccgagcacctgcaccattgcccttttcccttgagtaatggccgagaaacagcagcccattgggccagatcggtcgtgtttggctcccatgacattttcaatatttgaatttgtcactagtgtttaaaatctggtggctgtcacgcgttattccttcctcacagcagccctaggatgctgagaccccctcgggcacccgtcatgagtagcagagtcagccctgcagaggttgaggcaggcacctgcccagactgtgcggggcccatcaccaccctccagggtctcagctcctgtgcctttgtgggcccttcccccatacacaaatatttaaattacattgtatagcaaggataacccaggctggatttttaaattttattttattttattttttgggggacagagttttgcttttgttgcccaggctggagtgcaatggcgcgatctcagctcagtgcaacctctgcctcctaggttcaagctattctcttacctcagcctcccgagtagctgggattacaggcgcccaccaccacacctggctaatttttgtatttttagtagagacggggtttcgccatgttggccagactggtcactcctgacctcaggtgatctgcccgcctcagcctcccaaagtgctaggattacaggcgtgagcaaccgtgcctggcccatttttagatattcattattattgtagtattcatttcctctgattttaaatgaaattaaaattaaaacattttcaaggacccctgagaatgccatgcacctattggatcttggccctgtgtgtgttaggtctcacggggaagctgaccctgcgctgaccctggggctccagccggtaggggtccaagactagtcttgccttctcttctgccaacttttaaaccccaacttgagcaaagtgctcaaagaaaaccattcccaaactcagactgatccctgcaccccagagctgagaacattgggaatgggccacctccgtcccattcactggccttctgcaactgcagaccttgggccacgcctccaaaaagctgtccctggttaatcttgccagcacaccccttcctcctggaagcccttgcagtgaattgtcggtaggacctccagaagcttctagcagtttccggtgagctgctcagcagagcacccagcaaagaccaagcactagtgtcatggtttccctctgcagcccagacacaggcagccgggggcctacctgggcggtaaatcgtccatgctttggactgctcatccatgtccagaaggtgcctgctcttcatcctgtacaagtctcggttcacatcttttgctgtcctcattcccagtgcttgggcgatgaccagggccctctggggaccattgtctttgagaaacctgtagatgtcttcctctgggaggcaggatggccaggtggttagggagtagtcctagggtttgcatctgccccaccgcttcctagctgtgtggccctggacccagcccctcaaggcctggtttcctcatctgtaaaatgggtgtcatgataacggggtcatcatgacgcaccgcagaggtgccctgagggtgggggatgtgcacagagtgctctgcgctgggcctggcatgtggcgggtgcatggtgagggtcagctattgtctgactggagaaatcactgctcagccattcagattctcccactgtgagggctgggtcttggctctgaacactgtatgggagctgcctggtgggtgggacagggcccctgaacactggtgagatcttgtaccctcaaggagggcctggggttcctggggagtgggatcctgtgtcccgggaactgaagggacatgcaaaaacttaccccgttgttggctgaactgagggccaggggtctctggaattgtagctgcatgttgctggggcctctcggctgcagaaagaaagatgggtcagaggggtgggggacagaagacagcaccaggcctccaccccacaaaggtgggcagctccctaggggtaagtggcaatgccggtagttgcaaactcagactccagagttcaacacacttgacttcaaatcctgcctgcgccctggcagctgcggcttcctgccgattaacttctccggggctcagcctcctttgcctcctggggttgtgtgagggctgggtgaaccccaaaacagtgcctggctaatcttaagtgcatgataaatggcagctccttctggctgtgggctgtaaagctagaaaaggggggctggtgggactgcatatgttctgtgattgggaccatggcgtcattgctgtctccatcatgatgattttctattataattgttagtgttctgcagagtacctcctgtgtgcagggctgggctgagcctgacgcagggcctcctctcagcaacccctaccaagcagccctgctgtgagctccatcaaccagaaaaagaaaccaaggcacagagagaggaaacctgtgagctcccatgtggcagagttcagattcgaacccaggctcaaatctgtgcttgtccattgccaggatgctccctgcagggtcagacccgcctccccggggtggcagttaccagggctggacaaggccagctctgcaggaccctcgccttcaggatcagtcccgcccaagcaccaggtggcaggggatgtgagggagactttcaactcctttttcattcggtagaggacttggttgagctccctcttgggtgcttggcattccttcaccagctgggcaagtttcaccggggagccagcctctgtcagcacctgcaggattctttgttcaaggtggcctgggggagcgagcgggggacagagaggggaactgagtctcccaggtccccacagttgagcccaggctggaggctccaggaggcacgtaggcccctttttgagaggggtccagggcagaggaaagggcaaggaccccagcagatgccccctaagagcagtagggcagctgcatctgcccagagggaggcatgcaggctgatcagaaacggccttggctgcgcagcctggtggccaggggaggtgccacctcgcctgtgccctccccgggtgtgggttccagagggcagtggggttcctcagctctcaggtgtcctcagggcagaggggagtagagggcagaaggacggagccagagggaggcagggggacctgggagcgcaaaggcaagtcctgcctgggacgcctgcctgggtttacctgatgcccatcgccatcctccccgggagtgccctcctctcagctcaccatccatccatggcgccactatccatccaagccagagaccgaccagacatcagaaacagacctttcccccagtgcccagtcgtggagccctggaaatgccattcctggattctctggaatccccccactcctctcttttctgccagcaccacccccttcctcttcaccatctcctaggtacagtgataggctccccgttggcccgccagctccagtcaggtaccctccagatctggctctgccaaccacccagcttggcctgcacctgcccccaacttccctccaagtgctggcctgtctgtgctcccttcagccccactctccccagcccctttgtgcacactgttcctgctgccaggagcacccttccctcacgccccaacctgtatgatgtctactcaacctccaggcctcctcagatgccacttcctagggaaagcctgtctctgtgtcccagagtggctgggacgctgcttgtgtgtgggtcccctgcagaacttcccctagtgtcccctgctgtgcttgcatggctcactgttgtaccttcagcatctagcacagtgctgggcacacagtaggtgctcaggaaatggcagttgaatgtatgagtgactgagtgaatgaatgaatgaatgaatggggccaggagtggtggctcacacttgtaatcctagcacatcagaaggctgagatgggaggacccctagaggccaggagttctagaccagcctgggcaacatagtgagacccccatctctacaaaaaaagagaaaaatcaggtaggtacgatggcatatgcctgtagtcccagctgcttaagaggctaaaagtgggaggatcgcttgaatctaggaggtagcagttgcagtgagctatgaatgcaccactgcactccagcctggacaagaccccatctctggaaaaaaaaaaaaaaaggactgaatgagtgagtgtctgtctctagggacagacgtttacccaatagaccctgggcagggcccgggtagcttctccttggccagttggcaatgtgctgctgtttcctggcctgagtttaatgaggactaagcaggaccccaagaggttcaaggaggaattctccaaatggcccctgctcctcctgaggcagctcttaaaaatcaaaaccattagctcacacaatgattaaaagatcaaagccagctgctctgcccagagatgaggctggggcagacgcaggttacgggcagcacctggcagccagcagcctgggagagccactgtgggcgggggccccacctgtcaccaggaagcttctgcttcaaggaacctgagggcagtgcatgggagagcccttcttggaaagacctgagttccccttccaggacagtgactcagtcctttgtcatctgggctttctttcctgttcagaggattctccaggtttgcccagggttccttggtcacagcacttgtaggggagggaagaatcagtttgtgcctcaccctgatggttacaacgctgaccggcttgccgtgtgcaggtgaagaccaattagaagacctgggaattcccactcctgcgcccaccaaactcccccaccggcagccagcagcacctccatgcacctgacttcacacctggcttcaccttgtctcgcagagttttttgttttttggttttgagatggaatttcgttcttgttgcctggtctgcggctgcagtggtgtgatctcggctcactgcaacctccacctcctgggttcaagcaattctcttgcctcagtctctcaagtagctgagattacaggcacgcaccactacacccggctgatttttgtatttttagtagagacagggtttccctttttggccaggctggtgtcaaactcctgaccttgggtgatccccgcaactcagcctcccaaagtgctgggattgcaggcgtgagccactgcgcctggccgcagttttgattctggaaggctgaccttagggagccactgcctcggctccacacaccccagaggagatgggggtcagaggtgtggatgcaggacaagcactggccctgggctggcctcgactgctgagtcccaggctactgtgtctgaaaatgggaaattgtaaaatggagcaggtgtaggcaacaatttggtcacaaaaggaaaatcaactggggaggaagacaagaaaagccagcgagggctgagtccggaacctgcgtcagcacccgtgagtccccgaagaggaagctccacaggacctccgcggtcagcccggctcctgggccacaccctgacattagccctcccggggcacactctgtgttggttttttaaaattctgatggctgatttcctgggtttgagctcctagccctgccaactactagctgtgtgacctcccctccggcttcaggttcctcttctgtgaaatggagacagtaataactacttcaaagattgtggtgaggattaaaaacaaaacaaacacatcccccaaaccgcaaaaccacacttcacctacagtccacagcgcttagtggagaccctagagaacagcaattactcgatacactattggctttcattgcaactcttccaggaataaaatgaatgaaatgttagttgaggaaaggatgcaacaagggggaacaaaggcacacatgtatctcatcaaagcaaaccgctttgttctcgatatgactgtgacatgggtgttcagacgctaacaccagcgttcgccagctgtgttaccctgagagtgtcatttcacctctcagggcctcagttatctataaaatgggaatgacatggcacttgtccctgcaggccatcaggaaatgcttggaaagcatgtttcgaggtgcctggggcacagtcagctgtcaaagggggatggctatgctgtccctttctattttttttttttttttctgagatggaatctcactctgtcacccagtctggagtgcaatggcgacatctcagctcactacaacttccacctcccgggttcaagcgattctccagcctcagcatcccgagtagctgggatcacaggcatgcgccaccatgcccggttaatttttgtaattttagtagagatggggtttcgccatgttggccaggctagtgtcaaactcctgagcttaaacagtccacctacctcgcctcccaaagtgctgggattacaggcgtgagccaccacgcccagctggtctactattctttaggatactgctattgtcatcatgatctggaccaagcgaaacaggaggaaagagaagtagaaatctcaccccgggagctaccgctggtccttggaaggaagaagtactgtaccttctctgcccgggtcagcaggagcctgggccatgctgacagcagctgcaaggagtcggagagacttggcaggtgtgcaggcttctgcactgtggccctgagagggtgggctaggtcgaggctggggcttctgaagtggccgagcctggtgcttcttgcagctctgaacccacaaggggagggatgccagcttccactgggcaggtgtcagctgcttacagcccggaaatagatgcctagccaggccggccagattcggtttcaggagaaaaagaaaatgaaacttctctgttcgtcttttgaaagaaaaaaaaagtggaagccaggtggatgagcaagacagagttggggacctgacttgatgttgacagggaggagctgtaaacttggcaagaccagagcgtcctccgaagaggcctttgagacagaggacttccctcaccttccccgttccaggcacagcccacctggacctctacatttttattttctgaatcagcatcagagaactgaagaaaataaaaataaaaaaaagagcatgcaccacgtggagggggatgccagggcgtggcatcactctgatgatgtgaggggctggggctggttatctggtttctgtgtttttgtttgtttttgagacagggtttctgtcatccaggctggagtgcagtggcgtgatcacggctcacggcagcctcgaccttccggactccagcgatcctcccacctctcagcctccctagtagctgggaccacaggcctagaccaccatgcccggctaatttttgtattttctgtagagatggggtttcatcgtgttgcccaggctggtctcaaactcctgggctcaagcgatctgcctgccttggcctcccacagtgctgggattccagccgcaagcccccacgcccggccccgctggttcctgtagtacttcctcctcggggactcacaggtgctacagaggcaccgtccccagctctcagtggcttttcttgtcttcttccagtttgtttcccttgcccacactaggggcagaacatttaggtgcgtgaaggccctgagattgttcttgtgtgtatccatgtgagcctctttaatgaacacctattatgcgttttccaatctcaagtgctcctccaacccatctacagggtaggggccagttctgtcttcttctcaggggggaaactgaggctagaaaggcaagatcacttgtccaaggccacacagagtccatgacagagcttgtcctgtccattccccaattgtgtttcctgatctataacacccagaagtcactggtgaatcacccttagtgcacagatggcgtggagttccccgcctcatcataaaacttgcttattaattccagagtcagatgcctggggtcagcagccgagtggttcggaatgcaagcctgggtcagcatgcttgggtccaaacctggctccgccatttaccggctgtgtgacctcggacaaattatttaacccctctgtgcctcagtttccccatgtgtaaaaggacttaatcaaaggacctagcgcatggggtcgaggtgaggacctaaggggctgatacagcccagctgtcgggctagagccccagagccatccgtagtcacgggcaccgtggtcacctcacaggaatgcttctgggagaggacccgttgcttacataattctcaaaagggccagtgacctcagaaaaactcagagccactgttctcttccagatcacagaaggaggaactgaggcccacagaggtgaatgctgtgtacaaggccccccagcttttggcagccaagggggttgagagctcagccctggaagtccctggacttggggtctgtgtctcatctgcagagggctgggagggctagagacgtctgtgctccttgcagaccccatttatgcataaggagcagcttagcggcaaatacaaatggaaagggggtccggaggtttatcctgaagctatctgtctttgcagagcgagcacctggagcccaggtcttccgccctgcctgcatgttaagtgtttgaagcaaaaaaaaagtctcaatgcccaggccggcccagactagtcaactccaacctctgcggctggggcccgagggtgagattttttatgctcctgggtgacttttcctgcttccaggtggagaaccagtaagtctggggcaagtcaataacagcaaactgcaggatgcttttattctccttttatgtaaaagcgaaaactgcaggtatcaccctatgaaataacaatagtgctctttaaatgggggggtaggtggggtgctgagggagatgatgaaggtgccctccggaaggggctccggctgagccctgcaaggctgagtcccttgggtgtctggggtgccacgcccgaactggccaccaggtgatgccgctcaccaacctgggcttgggcgcaccttggcttcaagttccctctgatctgcagggaggagctcctaccccaacccatggttggactccagacttgatgaatcacagctccaagacgtgcccacccctcccactgccttgtcctgcatcatcctttattcttcctgtctcttcagtcactcatcgtggtttcttcactcatctttcctggaaggagtcagattccagctgtttctctgtgaagcctccaggcagttctttgtgctcttccggcctggcctcccagtgttggtcttgacacagcccaccactcccccgtggggaaactctctctccccccatctccagggcccatgctagcttctccccttccttccctggcctctgcagctcaggccttgaccccaggtccctggtgggcttgcaggtcaggttgagggatgttagcttggtcttgggtgccagccttacttctaggaagatggcttctgctgcagggaggaggctggtgcccctcacggctggtctccatccagactgtgcttggatgacccctttctgtccccgtggccacatcctgaaggcacatggagcccctctgggcctgagccatttttaggagtctgtagcagggaccaccatgccagtggagaccaagcgcctcgggaagttccctggacaaggattctgtcttgtctcttctccagggcaggttctccttcccagctgtgtggcgctacctctctgagccgcggtttctttaactataaagcagagatactaagaaaaagcatttttgacacttagtatgtgctcacaacatttgcataagttagaaaacatgatgcatctccacagtatctctttagacagcaaacaaacaaaagagagcaatagacaaaaagaagaaaacatttcacgtgggtaggttccacctttctttgcattccatggcacatctggagatgaagccaggaatctgctatgtgcttgtcacccactgagtgggagtcttacttttaaatacttagattgcctttatttctcttctctatttaagagctgtttaagttgagtttgaccctaaggattatctttaagcctaaataccagtggctaaaacaatagagttgtgtctttttcttgaaagagttgtaggcattccaggtttagtgtggtgacctggggtccttctacattgtcggtctgccatttgtggccttcattctcaagtttgccttacattttagaatggctgctaagctccagccattacatctgcattccttccagcagggagtaggaaagggaacaagggcagatatctccctttaagcacgcatcttacaagttgcacacacattccactaataccccattggtcagtcttgtggctcttatctgtaaggggaggcctggaaagatggtctgtattgtgggtcaccatgtgctcagctaaaattggggttctatgactttaaaatgggggacagtagatattggcagagacctagctatctctgccatttcaaggttccctggtgtccccaagaaaggagcaaagatacctcctctgtgccttcaggtgtgtccattcacggggttcatttattcagcagttgctgtgcctccttactctgcctggaaagggcctcaaaggccacaagacttccaagatggcaccactgcctgctggagtcctcatctccttttgccttggaaggcgcactccctgttcatggcttgtgtttttctggaaactattagagctctccgcccaaaccagatgataattacatgttactgatcttgagtctttaaatttttctctctctcttttaaaagagagatatttttactgcacattgtgttgacaaaacccaagtctcccttctaccaggcagcctggattttattttcagatttcctctgtgaattcatgcagggggaggaggtggaaaggtactgaatgtgaataataacatgtctttggtcagggacaagggtcagagaaccaggggtggctgaagaggggaatggagattgcccaaggtcacaaagtcatcctcctggggtggaatgaagactgagtaaaactggtgtgtccaggaaagcaggttttcattgcagtccctagaggagtctgccctggccctgttctctgctcttccaggcagagctgttgatggggcctccattgtttatctgtatccattggagttgaagagacctggggttctggtcttggcacccagctttttaactctgtgccttgagcaagttactgctctgtctgaggctcagtttatgtctttgtaaagggggtcatagaagtacttaccttgtgggattgttgcacaggttaaatgggattgtgtacctgtaggtcctagtagagcactgggcacatagtatgtgctcaataaacaggagctagtcatgttatcaccatgtgatgctcagctgtccctctctctggtaataaagcaatcctattcactcacctgatcatttgccaaatactttctcatgccttccttttatcgggccacatgctgggccctgcagggcatgggagaaacgtctctgtcttcgtctgttttctgctgctataacagaacatcacagcctaggtaatttataaacaataggattttatttggctcatgcttctggaggctgggaagtccaagagcatgacaccagcctctggcaagggacttcatgatgtattatctcatggtggaaggcagaagggcatacaagcatatgagacagagaggaaaggagctgaactcccaagataaccaaactacaatggcaaaaaatagcatttgtccattcatgagggcagagccctcctgacctaatcacttcttaaaggtcttacctttttaataccatcacaatggcaattaaatttccacatgagttttgcaagggacattctaacaatagcagttccatttgctgattcctgcctccatttcccactctggctgcagaagaggccacactgcctggtcctgggatgaatggggtgactcagaccaagtcctagggccccagcactgactggtaaaggcgacctgagcggggggcaacagcacctgctctcaagtgcgtaagaggtcagggaagtgggcatggacagggcatggacagtcctggtagaaaactgagatttttacccaggaggtaagggaagggccaggggaagattttcatcgaaggcaagtggaagatttggaaaggtggccctggttgctgggagaacaggtgacaggaagtgggcaaggggagagggaaggaggccacttcatatttaacttttattataatcaaaagattttaaaaatcattttgcttccaaaattatttgcctacaaaaaattcactgaattacaattggccacaatttatcaagcattattcttgggaattcttgcaaaatgaggaaaatttcaccacctataaattcttttcaaaaataatgcagtgtcatgaaatttttatgagaactaaatggaacaattaatgaactcgccatgatgttagttttctagatgtttaattaaacatttattgattttaattttgcagtgggtttttttttcttccatatttttgggcacaaacattttcagaggctcttgaaacgtctgtcagcctgatgttctaagactttcacacctgaaaggtaagatcgggaaatggagggacacacatccaagggacagggccctggcctcccagaatagtggacagggtgtgaattgatggtggcattgggtgttgctgagtgcgggacagaagacagggcaaggggagatgcgtttacatgttaatgtgtaacttcttttcatttaaaatgggtatcctcctttgaaatttgacccaaagacttggtaacccaacagcaacttacatttatttggagcttattgtgtactcaatttccagtgccttacactatttcattgacttcttatagcaatgctatacggtaggtaattaagattaaatctgcatttcacagacaaggaaactgagacatggagaaattaccaagttgactggccaagatcatagagctagtgagcattaaagatgggattgctatgagaccctagaatccaagctcttagcaattctaatattgccaggaacaaatctgttgttataattctgcaaagataagaagaaatgctttctacgtcagacaactctgctatctagcatggcttttgaggcctgtcagaaaaagtaagttgcaatgtcattgcttcctaaggtttctttgactgaatgtgcccaagggaacaggacattgtgccaagtactcaggggcacagaaagctgactagctagaagaagagagtctaatatttaagattttttcctcattatgatttttaaaatattgactacatgttgaaacgatatttgatatattgggttaaaaaatcattaagatttttaaaaatagaacaaggtgactatatgtgcacactgatctcatatacgcagccccagacacacacatagcctctctgtgctttctcctccctgagcccttctcctccaaggttctctgactttctcactttactgaccactgctttctagtttgtctgaggctgagcactcccagaagcacactccaaaggagagctttgagtgcaagttggttatctgagaggtggtctcaggaaattctgggaggtgggtgtggaggtgagcccaggaaggatggagagcagtcaaggatgtgccatctgctgatgacttctgcgggcagctggagctcaatcctgctggacaatgctgggagagcacgtgcctcagggtgatctacccataggacaagggaactggggtattgatccacccactcccatcatcactcagtgaggttgcccctggcagggggtgttaattccctggcactcttggcctgctacatgggggccagaagaaactccaggcaaggcacagatgccttcagctggaagctggacccatgtggacagaaatgcaaagggccaagtgggtgtgggtgggataccaaccacacctgcgacagatttctgcgtaagttattccttacggctgctgaggcctggagtggttaagtagcatgcaggggttgaatagctggaaaggggcagtggagaggatttgaattcagattgtatgaccacagagctggaggccctgacctcaggctttgcagattcctctgcctttgtcgactcttatgaagggcaggcaggactctaactctatgaatttaaaaaattcatttttaaactcactcactcactcaatcaagttagaagcttttaaagacaaatttaataagtttgaactcagtaaaagccttttaataagttgaacgtcatgatttcagccctctgctcacagaactattaggcaagatggtgagggggagggggcaggaagggaagtggggggtgagggtgagaaggggaagttagaggaagtgagctaacacacacaaacagacacacagatggatctttctttttaaaatttatttgcacatttaaatccatggtttgtttcaaattgtttgattgtgaagcttttataatattttgttttatttttagaaacagttcttttacttcagaacaactgtacaaagtgctaaagaaaatgcattgctgacttggcacgggtttgctgtgtgttctgtctcctcgctggctcacacatgcttcctcacactgaacgttccgtctaggcctgcgactgagacaggaagccagacacacatgctgaactaatttcaacaaatatcaacttaaaactaacctgaagtcgttggaaatggacggactggttcagacacggctgccttccccagcttcatgcacaggaaactgcactgtctacacaatgcaagagtgttgctgagagatgacagcgtgctggcagtcctcacagccctcgctgctctctgcgcctcctctgcctgcgctcccactttggcggcacttgtggagcccttcagcccaccgctgcactgtgggagcccctttctgggctggccaaggccggagccggctccctcagcttgcagggaggtgtggagggagaggtgcgagtgggaaccggggctgcgagcaagagccagctggagttccgggtgggcgtgggcttggcgggccccgcactcggagcagccggccggccctgctggccctgggcaatgagggacttagcacccgggccagtggctgcggagggtgtactgggtcccccagcagtgccagcccaccagcgctgcgctcgatttctcgccttagctgccttcccgcggggcaggcctggggactgcagcccgccatgcctgagccttcccctgcctccatgggttcctgtgcagcccaagcctccctgccgagcgccgccccctgctccatggcacccagtcccattgaccacccaagggctgaggagtgcgagcacatggcacagggctggcaagcagctccacctgcagccccggggcaggatccactgggtgaagccagctgggctcctaagtctggtggggaagtggagaacctttatgactagcttagggtttgtaaatacaccaatcagcactctgtatctagctcaaggtttgtaaatacaccaatcagcaccctgtgtctagctcagggtttgtgaatgcaccaatggacactctgtatctagctactctggtgggaccttggagaacctttatgtctagctcagggcttgtaaatacaccaatgagcaccctgtgtctagctcagggtttgtgaatgcaccaatggacactctgtatctggctactctggtggggccttggagaacctttatgtcttgctcagggattgtaaacgcaccaatcagcaccctgtcaaaacagaccactcgctctaccaatcagcaggatgtgggtggggccagataagagaataaaagcaggctgccccagccagcagtggcaacccgctggggttcctttccaccgtgtggaagctttgttctttcactctttgcaataaatcttgctactgcacactctttgggtccacactgcttttataagctgtaacactcaccgcgaaggtctgcagcttcactcctgaagccagcgagcccacgagcccatggggaggaacaaacaactccagatgcgccaccttaagagctgtaacactcaccgcgaaggtctaaagcttcactcctgagccagcgagactacgatcccaccagaaggaagaaaccccaaacacatccgaacatcagaaggaacaaactccagacgcaccaccttaagagctgtaacgctcaccgtgagggtccgcggcttcattcttgaagtcagtgagaccaagaacccaccaattccggacacattgccatagctagaaaagtcttcctgtttttcatgattaatccatttacttgtcaagtgtagtgaaatctgttcttgctagctgcccagcacccaaccccttattctggtaaaatcccctcaattttcctttgaaaacctcctcaccccttctcaacccatgtggcgctgactccctctccaaggttcagggcagggcgtgggactcaagcttggccaattagagccttccatttttatggctgcagtgactggtccagagatgggcatgtgacctaagccaagccaatgagcttcaattctgagacttctgcaggaaggactggggactaatttcttcggagtggatttagaagtgtaaggaaatgagcctagataaaagatagtgccaggaaaggagaatttgaacagaaatcagtagagagaacagcaatttgatggtggagacaaactccccctaacaccaccgtgagcatgtctagatccagtagtgtataatttagcccagctctagactctggcttttcaattatatgcgccaacaatgtccttttctgctaataggtctcatttaggtgtaggtcacttactatagaaagatttacctgatacataaacttattttaattttgttttaacagaaaaccaaaatgttgaatcaactggttcaagatcactgggtgaaggtctagggatgaaaagcatttttgagagagtgtagtcagtccagagaatgcctgtgtcccaaccttgccatgtggtctctgcttgttcatcatcagtgatgggccactcgctgtgtgtgtagcagtgctaataatcagagttcctttcttttatcctagagataatattacattgttcaaagatgtacgcatgagatgttcatcacaggattggttacaaaggtgaaggaggcacagacagcctagatatccaaacaaaagggatcaggtcaatgaattaggaagtctgtacagtgaaatgctctgaagctatgaaaaatgggatctagaattgtatttattgatatggaaaagtgttcacagtatattggaaaaaatgtttataaattgtatgattccattttaaaatgtctgtgattatccataacccagaaaaatactgagagtatggagtatgtctccgagatacataggtgatgtgtattctagattttctttctttctataataaaaatggattacctgtgtttcttagtcagcttggactgtcataacaaaataccatggccggagtggtttcaacaatagaagtttcttttctcacagttctggaggctagaaattcaggagcagggagtcaccatggtcaggttccggtgagagctctcttcctggcttgcaaatggctgccttctcattgtgtcattgagagagagagagagagagagagagagagagagaccaactaagctctctggtgtcttttctcagggcactgatctcagggcacatgatggccacatccttataatcatatctaaacctaatcaccttccaaaggccttatgtccagctaccatcccactggcgctagggcatctacttaccaatttggagagtacacaactcagtccatagcactgtgtaataaaaataatagcaaaaatcaattatttacattgcatgggactttgcaatgcaatgaacaatatcagcatagtcacaatgtaaacgccatttactgagtttcagatttagaaacatctcacggataaagcacagatgatttcattatgccgcagggcagagtccagatgtcattggtgttgaagagttggacataacaatgaagaggccagaggaggcagtgagctggaggccagggtgggattccggattctgcactggcaccatggggagtgtagagccgcattcccttatatggaacaagaaatagagtctagatgaggcagggaagtgaaatttttcccctgaagttttggaaaattgagactataaaacaaactgagagtagacagattaactggaaaaaaggaatacaaatgtgttaggtgcactgtgtgcacaggagtcgtacaaaatatgaaaactcaaagaaatgtccagatggctgatgcttttatagcatcgtgagcttacagaaagaatagtttggcgcatggaacacgttatggtggcaatgcaggttatgagaaggagagaaggggaggaaatgcatggagcaaagacaatcttgttttgcagatgaaacttcacctcagaaagaatagatggtagccggtaggaatgtttctctgtcagaactttaaaggtgtcaaactctcagttaatttttttttagatctggacaagatgggcttagacagagcctgttcacatctgttgtttacttcactgtatttcctccgcagatgcagatctcccctacaagagacatctttgcagggctagccttaggttcacaggacctctgaatagccatctagaaatatgtcagatagatatattttggggtgaaatatttttggtttcctttaataacaggcatgtttaggaaacccaatctagcaacaagaaatactcatccttctccagggcaagtgaaaaattcttcaagatagaccatatattggcaattatttctttaacatgacactgaaattttaaaaggaaccaacggaaaaaaatagctaaattggacttcgtgaaaatgaaaaacttttgtacttttaaagaacattatcaaaaagatgaaaaacaacataaggaatgggagaaaaactttgcaaaccatatatcggatagagatacactatctagagtatataaataagtattacaacttaacactgagaagacaaattgcccaaataaaacatgggcaaagcattgaaaagacatttctccaaagaagatgtacaaatgataaataagcacacaaaaggattcagaatatcattcatcgttagggaaatacaaatcaaaacctcagtgagacaccactctgtacccactaaggtggccattaagaaagaaaaaggaaagtaacaaatattggtgaggaactggagaaattgcaacctttataaattgccagtgggatataaaatggtgcatccactgaggaaagcagtttgtttcttcctccaagagttaaacataaaactactgtatgacccagcaattaataccactcccaggtctgtatccaagaggaatgaaaacatacgtccacacaaaaacttgcacaagaatattcatagtggtatgatttgtagcagccaaaaagtagaaactacccaaatgtcaatcaactggtggataaacaaaatatggtgcatccatacaatggaatatcatttaataacaacaaaaagggatgaagcactgattcatgctacaacatggatgaaccttgaaaatatgctgagtgagtgaagccaaacacaaaagaccacatatcatatgacgccacttagatgaactgtccaaacaggcaaatctatggagatggaatatcgattaggggtttctaggggatggcaaaagagggaaatgagggaacagctactaatgggaataggatttcacttcggagcaatgaaaatgttctggaattagataatgataatggttgcacaattttgtaaatatgctaaaagaactctgaattgtacatttcacaaaggtaaatgttatggaatgtgaattgtgtctcaattttttaaattaaaaaaaaaaaaagaaagaaagatggccaggcatgctggctcatgcttgtaatcccagcacattaggaggccaaggcaggaggatcacttgaggtcaggagttcaggactatcctgggcaacataatgagaccctgtctttactaaaaataaaaactaaaatataggcaggtgtggtggtgcgtgcctgtagtcccagctacttgggaggtggaggtgggaagattgcttgtgcccaggagttgaggctgcagtgagctatgatcgcaccactgcactccagcatgggcaacctggtaattgtgtgcacccagcttcataactgtggtcatctgaaatactgtgacaaacaactgaagtctttgatgaggttgttcaaaaaccacagtggattaccactacacctgcagatcctgtctcaaaaaagaaagaaaggaagaagaaagaaagtgttgcaggagaacttccattttcagctctgacatgctgacaacttagaagtcatcactcttaacccttacaacaagaaaatctgaacacactgaaaatcaataacttttctttgactcctcagagtactgaagtcagagggcaagcagccaccctaaaatatgcagagatgactgaatccagtgactccccactgatatctgtttaactggggaagaagtttttggaataaattggtagaaacacttaactggtaattttggtgaattgtcagaggatgagtgtgtactagcatgaaaattaatcctggcagctgcagtcttagggggcccccacattttcatgggttttacctctaggaatccctccaggtttttagagtaaagaagtgagaagatccccagctgggctggcaatggaagggaaagagtagccactgcaattcacccagagtgtcctccacaaaaatgtcctgctctccagggaaaaagactccaccggagccctcagccttcctgtcttacctaagcagggagagaaaaagctaagcaacacttgtgaaggtcacagcccaggaacagcagcacacgaagtaactcagattcaatcataagattataaaatccttatcttccccatactataccaccacaccaatagggcttcaggaaaataggagatttcacccggaagagcaggaagacacaggctgtctttgaggaggaatacttaggagagccccaagtgaacagggataatgaaaacaaggacactagaggaatttgaagtctctggcactacagctacagaaaacattaaatacagcccaactcctggacagaataacataaaacctcacacttaaggcctctatacctcaattcttattacccaatacctgatgtctggttttcaataaaaaattaccacacatgctgaaatgcaagaaaaaacataatctgaagagacaaaacaagcatcagaaccagacttagcaatgacacagattttggaattatcaggcagaaaattgaaataactatgattaatatggtaagggttctaatgggaaaagaaaagtagttaggcaatgtaagcagagaataaaaatgctaagaaagatgcaaaaggaaatactggaaataaaaaacaccattaactgaaataatgaatatctttgatgggctcatcaatagaataaatccagcaaaggaaaggaagagcttgaaagtacatcaagagaaacttcccaattggaaaagcaaagagcaaaaagaatggaagaaaacagaatagaaaatccaataactgtgggacaatttcagaagatttaatatatgggtaactggaataccagaaggagatgaaagagaaaacagaccagaggagatacttgaagcaataatggctgggaattctccaaaattaatgacagacaccaactatttgatcttgggagttcacagaacatcaagcaggataatcaccaaaacgtctacctagatatattcaaagtgacaaaaaacaaagataaagagaaaacaacgaaagaggccagaaaggaaaaaagccctatcttacctatagaggaacaagaaaaataattacatcagacttctttccagaaacaattcaagcaaaaacaaaaacaaaaacaaaacaaaaaacaaaaacaaaaacaaaaaaattagtagactaaaatagttaaagtgtcaaaagaaaacaactaccaacttagaattctatgttcagttaaaatatccctcaaaattaagagaaataaagacattcccatataaacaaaaactggagaaattattgccaatagacctgctttgcaagaaatattaagttcttcagggagaagaaaaatgatgtaggtcagaaactcagatttacataaaaaatggaagggcactcaataaagtataagtggagataaaattaaattttatgtttcttattttgatgatttaacaggtaattgttcaaaataacaatagaaacaatgtattcattgatcataactttacagaaatgttgtaaagaacaggagggaggaattggaactctgcgctgtggactgaatgtttatgttcccctaaaattcttatgctgaactgctaattcataatgtgataatatttaaagatgagaccttagggaggtaattaagagttagactaggttacgagggtgggactctcataatgggattagtggccttataaaaagaggaagatctctctctctttctctctctctctctcactgctctctctctgtctttcttcgtccctctgtcactccctacctccccacacacatgcactgagaaaagtccatgtgaggcgacagcaagaaggtaagtatctgcaacccaaagagaaagccctcaccaggagcctaatcagctggcattttgatcttaaacttcctaacttccagaattgtgagaaaataaatttctgttgcttaagccagcgagtctatggcattttgttatggcagtctgagcagactgttataaagacactctgttacaaaatacatgcactctacatgaagcagtccatttttagaaattggactaagaataattgtaaatgtatattgaaaactctagagcaaccactaaatttttaaaaatgaaatattgatttgttaagagaggggagaaaaatggaatcatataatgctccactaaagccaaagacatcagacatcagaaaaacaggaagataaaaaatgaaataaggaataagtacaacaaagagaaacagctacaaacatggcagatattagtccagatatatcaataatcactttaaagatgaatgggctaaatataccagttagaagacagagtgccagaatagatttttaaaaaacaatatccttttatatattgtctacagaaacccactttaaataaaaaacttgaacaggttaagagtaaaagaatagacagagatatactatactaacacaaatcaaaagaaagttggagtagctatgttaatttcacaaaggcagacttcaaaacaaggaaagttatcaggaataaagagggacgttatgtaataataaaaggggtagttttccaaggagatacaacaatcctaaacatgtatgaacccaacacagaacataaaaatattcaggacaaaaactgatagaaatgcaataagaagtagaaaaacctactcctgcagttggactctccaacacctctctttagtaattgatagatcaagaaggcagaaaatccgtaggaatagaattgatctgaacagcagtgtcaatcaacaagatgtaattgacatttatagaatactccatctgacagcaaattacaacattcttctcaagcttacataaaactttcaccaaaatggaccaaattctgggccataaaacacattttaacagatttaaaataatataggaatcatacgtagtatgttctcagaccacaacggatttaaactatatcagtagttatcaatgtctggatgtaaacaacatagatttggatcataactccaaaagacacaatgctgaatgccataatcccaaatgttgaaatcctcaaagataaaaatctctaaagtttaaatctctaaagtctcaaatcccaaaaatcacaatcacgggatggttgcatcatgtcaggcagaactatgaccttgttattgtcatttaaaaattaagtatggcttaaagagatgtgtatacgggagccaaattgacaggggtgaaattttagacttaattttaggtttcgatttgactggattgagaaatagtagatttactagaatcccagtaaagcattattttgggggttgctgtttgattgccagtatttttttctgccacatctggggtctgtatgtaagtgcgtgtgaaacgggtttttgcatgcccaaaacaacacagaagtatggcacagaagataagaaaatataatcgggaatgctcatgtcagtgtctattaagtcacagaatttcaaaagaagtggccatacagaaagtgaatgtgaacatctttttgaggacagtcatgtgctaaagggaaaaaagcagctattcgtcatgatgcaagactgcaaaacgtagttaatgaccatgaaagccagccagctcttatgggctattcctgaggaattacccataatctatacctgagataccttttacttacatcaatttttttagatttttaggtttttctcctttttttttctttttctttttttttttttttttgagatagggtctcactctgccacctaggctggagtgcagtggtgtgactccactgctgccttgacctctctggctcaagcaattctcctacgtcagcctccagagcagctgggaatacagccacacaccactacgcctggttaatttttaaatttttttttgtagagatggagtctccctatgttgctcaggctggtcttgacctcctgggctcaagcactcctcccacctccacttcttaaagtgctgagattacaggcatgagtcactgtgcccagcactttcttttttcaagtttgttttttttcattattttaaattgtcagcattcatttttacaattcattatgctatgtatttcatgtttgaatcatttccaatactgaaaatataaattgtatagagacttttagggagctgtaattcattttatgcattttttacaaatttgactccatgaaagtgcactatcgcaatgttcactttgtgtgtaagcattgtgcgtgtatggaaaaatgttgaaactgtctcaataaacgaagagatgtccttttcgtacatctgcatttgtgaaagataacatttcttgagatcttggctctttgtgaaactatacgcagtggtaatcaattgtgggtttttaacaatctcatcagacttagattgtttgtcacaatattgcagacaaccacaggtagaaagctggttgcgtacaattaccaaccatagtgatacaagtttatacgttccctttttaacctatttcttttcgcagtttgtctgctcataactgttatacccatgtggctgtctttagtatacctgcttgcaaaaatatgtgttattattgcctattttattgtgtaaggtggcctctgaagtgttctgttatgtttttatgtttctcaaataatttcctctttaaaatttcttctttaaaatgtcttttaaataaattttttttcagaattatatttttgaaatttcgatcttttgggattgtaaattttgggatttcagacttgggtgacttttatcttttaagatttcaacattcgggactgtgtctttgggattatgattggctctcaaacaacacattcctaaataaccaatgagtcaaagaagaaatgacaaggaaaattagaatatactttgagataaatgaaagcatgaaacataccaaaacttataagatgcagctaaagcagcacttagagaaaacttttagcactaaaatgtaaagatcagcaaagaagaaagatctcaaatgaacaacccaagtcaacacctgaagaaactagaaaaaggagaataatttaagcctaaagcaaatagatgtgaaaataaaaatcgtaaaacaattttaaaaaaatcaacaaaaccaaaccctggttcattaaaaaaatcaataaagttaataaacctctagctaggctaatcaagaaaaaagagaaaagacataaactaccaatatctgaaataaaagagtcatcatcattactgattccatggacattgaaaggataataaaaaatatcaaaaattgcctggcgtggtggcttacacctgcaatctcagcactttgggaggctgagacaggtggatcacttgaagccagggttttgaaaccagcctggccaacatgatgaaaccccatctctactaaaaatacaaaaattagctggctatggtggtgcatgcctgtagtcccagctaagagggaggctgaggcccaagactcgcttgaacccgggaagtggcggttgcagtgagctgagattgtgccactctactccagcctgggcaacagagcaagactctgtctcagacaaacaaacaaacaaagtaaaaaaaaaaacaaacaaaaaacaaattctaaacctacaaatttggtgacttaggtgaaacagaccaattccttgaaagatagaagctgcaaaaaactcacacaagaataaataatctgaatacctatgtcaacaaataaactaatttataattaataaccttccaataaagaaagcatcaggctcagatggttttctttggtgaattttgccaaacatttaaggaagatatgatacaaattttctacagtctcttccagaaaatagaaacagaggaaacattatgtaaatcattctatgaggctagaagtactctattaacaaaagtttataaaaacttcacaagaaataaaaactatgaaacaatatcttttttgaacatagagcaaaaatccttaactaaataatggcaaattgaatccaaccatgtataaaaagaattatacaccatgacccatgacccagtggtatgcaagactggtttaacactcagaaaacccaacatcatccacactaacaggctaaagaggaaaaatcatatgatcatatcagcgatacagaaaaagtattcgacaaaatccattatccattcttgataaaaggtagtaggaataaagatgcaatagacggactgtgtatccccaaatgtatatgtagaaatcttaactcttaaggtgatggcataagatgggcgcaggaggaaagagctttcatgattgggattagtgcccttataaaaaaagatttcagagagatctctcactccttccaccatatgagttcccagcaaaacgacagctgtctatgtaccaggaagccctccccagacactgaatctaccatggctttgatcttgggctttccagcctccagaactgtaagaaatacagttgtgttgtttttaagccacctagtctatggcattaatgtcatagcagcccaagtcaactgagacaagaggagaactgcttcagcttaataaagagcagctatacaaagaacttaccattaacagtatacttaatggtgagaagctggatagcttccctgctaaaattaggaagaaggcaaggataaccttctcactagttctgttcagtattgttcaacattgtactgaaaggcctcggtaactacctaggacaataagacaataaaaggaaataaaatgtgtacagatacagaagaaataaataaaactgtttttgttcatagatgacattattgtctacatagaaaatcctaaagaatcaacaacaacaacaaaaagtacctgcaactaataagtaataataacaatgtcttcgggtatcaggttaatacaaaagctaattactttcctatataccagcaatgaacaattaaaatttgaagttaaaaatatcactcaaaacagcaccaaccaaaaatgaaatacttaggtataaatctagcaatatataagatctatatgtctaaaactacaaaatcctaataaaagaaacaacagatctaaataaatggatagtctgtgctcatgaattggaagattcaatattattaatgagtcaatttttcccaacctgattcatagagtcaatacaatcccaataaaaatcctagcaaactattttgtagatattgacaaactgattcaaaattgtatattgaaaggcaaaatatctaaaatagccaagacaataatgaagaaaagaaaaaagtcggagggctcacactaacttatctgaagacttactataaagctgtatccatcaagatagcatggtattggcaaaaaagtggacaaattgattagtggaacagaatagaggtccagaaagagactacacaaatatagtcaattgatctttgatgaaggagcaaaggaaattcaatgtagagaggaaagtcctttttaacaattggtccttttaacaattttaacaattggaacacttgaatatcatgtgcaaaaacatcaacctagacgcaatgcttacgctttcccaaaaattcactcaaaatggatcctggacctaaaacacaaaaccataaaaccttgagaaagaaatatgggtagaaaatctaggtgacctttggcttggtggtgagctatcagatataacccgaaaagcatgatccatgaaagaaaaaattgataattattgataaattggactttattaggataaaaaatcctgatcggtgaaagacaatgttaagagaataaaaagacaagccacagattgggagaaaatatttacaaaacacacatcagataaaggacttgtatcaaaaatatacaaagaacttgtgaaactcaacaataaggaaacaaacaaccccatttaaaaatgggccaaagatctgaacagatacctcaacacagaagatatacagatggcaaataagcatatgaaaagatgctcaaaatcatttgccactagggaatttcaaattaaaaaacaataagttatcatcacacatctattaaaataactaaaataaaaagaaaacctgactataccaatgctggcaaaaatatggagcaacaggcgttctcattcttgctggtgagaatgcaaaatggtacagctactttggaagatggtttggtagcttcagacaaggcaaacatagtcttactatgtaatccagcaattgtggtactaggtattacccagaggatctgaaacttatgaccacaaaaaaagcctgcatatgaacattttagcaactctgtttggaattgcaaactagtgattatgaaacaacaaaaatgtccttcagtaggggaatagataaacagaacatggtatattgatacaatagaatactatcagcaatgaaagcaaatgagctaccaaggcacaaaaagacatggatgaattgtaaatgaatactgctaagtgaaagaagctagtctgaaaatgttacatattgtatgcttcaattacttgacattctgtaaaaggcaaaattatagtaatagtacaaagataaatggttgccaggggattggggggatggtaaaggggagaagagattcattaggtgaaaaatgggagatgtttaggccagtgaaactattccataatgatgaggtaggaggcaggacttgactccagaagtggggctcagacactaggccaacctgaggactagctaaaacagggatggggtggaagcagctttccatgagacacaccaccagtgtgccatgtcagtttgccattaccgtggcaacacctgggagttactgcccctttccatgacaatgacctaacaacccaaaagttaccacccttttcctagagatttctgtgtaaaccaccccttagtctacacgtaactaaaagtaggtataagtacgattgcagaactgccctgagctgctactttcagcacactgcctacagggtggccctgctctgcaggagcagtcatggggctgtaacacttttagaactctaataatgctgcttcaaaaaagctgttttcatctaccctaccactgactcacctttggattctttcctgggtgaagccaagaacccttgcaggctaagccccactttggggtttgcctgccgtacatcaatgataccttaatggtagatttatgacactatgcacttgtcaaaatccatagaactttgcagaacaaagaatgaaccttaatgtatgtaatttttttaaagattaggaggttgagggaatctcagggtgaaatgcagaatgtgaccgaacaatctaactgcattacaaatgtagggaacaacctcaccgaaagggaaagggtgctaacccaagtaactttggaaatgagtggagtctgtaagactaaagacaaaagaaactgtacataaaaactggatgctagttgataaaattatttcctatgaggataccagttaacaattctgatactgctacctaagtacacaggaactggataattaaataaatggatgatgagtgatgggacccatgtttctcactgctggggtgagagattgcagataagtaaggggagaaggctagaataattcatgcggtgacagattaggattggagatagcagtatgaattcatgtttagtttaatttaaatacagatggttacatatacaaatatttataaatatatgtatatgtatatataaatataaatatttataaatataaaatattgataaatatatgtataaatatgggctactatacacacatatatttccttgctaagtcagctgaaagggtctagaaacaatggaacccataatagcatgaacacctagagtttggaatgtcctagagacttgttgaatggctttgtccaaaatgctgatagtgatatggacaataaagtccaggctgaggtggtcacagatggagataaggaacctgctgggaggtgaagcaaaggtgactcttgttatgttttagcaaagagactagcagcattttgctcctgccctagagatttgtggaactttgaacttgagagagatgatttagggtatctggcagaagaaatttctaagcagcaaagcagtcaagaggtgacttgggtgctgttaaaggcattcagttttaaaagggaaacaaagcataaaagtttggaaaatttgcagcctgacaatgcgatataaaggaaaaccccattttctgaggacaaattcaagctggccacagaattggcataagtaatgaggagctgaatgttaatcaccaaggcaatggtgatggcagcccttcccattataggcccagaggcttaagaggaaaaaatagtttagtgggccagccccagggtccctctgttgggtgcagtctagggacttggtgccctgcatcccagctgctccagccgtgactaaaaggggacaaggtacaggtcgggctgttgcttcagagggtggaagtcccaggctttggcagcttccacagggtgttgagcctgtgggtgtacagaagtcaagaattgagatttcagaggatctatggaaatgcctagatgtccaggcagaagtttgctgcaggggtggggcacttatggagagcctctgctagggcagtgcagaagggaaatgtggggtcagagccctcacacagagtccctattagggtactgcctagtggagctgcgagaagagggccaccatcctccagaactgagaatggtcgatccactgacagcttgcactgtgcacctagaaaagccactcaacaccagcctgcccatgaaagcagctgggaaggaggctgtaccctgcaaagccacaggggtgcagctgcccaaggcggtgggagcccacctcttgcatcagcatgacctggatgtgagacatggagtcaaaggagatcattttggagctttaggatttgactgctctgctggattttgtacttgcatgaggcctgtagcccctttgtttagatcaatttctcccatttggaacagctgtatttatctaatgcctgtacccccgttgtatctaggaagtaactaacttgcttttgatgttataggctcataggcagaaggggcttgccttgtctttgatgagactttggactgtcgacttttgagttaatgctgaaatgagttaagaatttgggggactgttgggaaggcatgttttgttttgaaatgtaaaaatggatatgagatttgggagggttcaggggtggaatggtaaggtttggctgtgtacccacccaaatctcctcttgaattgtatctcccacaattactacatgtcatgggaggaatctggtgggaggaaattgaatcacggggatgcgtctttcccatgctgttcttgtgatagtgaataagtcttacaagatctgatggttttaaaaatggaagttttgctgcacaagctctcttctcttgtctgctgccatgtgagatgtgcctttcagcttctgccatgattgtgaggcctccccagccacctggaactgcaagtctaataaacctctttcttttgtaaattgcccagtctctggaatgtctttatcagcagtgtgaaaacaaacgaatacagcagagatcagaaaactttggcaaagggtcagattctaaacattttaggctttgtacatcgtatggcctttgtggcaattactcaactctaccattgcagcacaaaagcagccataggtgacctgtaactaaactggtgtggctgttttccaataaagctttatttacaaaaacaggcagctggggatttggtgtatgggccaatgtttggtgacccctggtctagagggacgacacaaacagcccaggagcccagcagggccctgacactccttagagcatcttgctatcgaaataatgcatttcctagtcactgaaatccctgtttgcttattttttgttacttgcagccagaagcccccagacagatacaagtgtgccagctcctgtgcccactcctcccctgtttcctactggctgcactggggtgggtgggggaggccaggggtggacaggcagctggatggtgcacatctgtctactcatatctgactgtccatccatgggaagattttgaggaaattggatgaggaaacagcgtgggtgggatagagcatcccaactcttccaagccagtgacacagaaggccggctgacttctctgcctcggtttccatgtctgaagaatggggtgttgtgagaatggaagcagttgtggagtgcaggcctggtccctcctgggagcacgtgtttatcccccatggacaatggacgtgagtctggccctgacctcaggcagtgcagtgaccttggggaggagccatgaacgccacaagcagtgcagtgactgcctcagtagagccggcacagagaagctgggggcatcctgggaggctttctggagaaggtgctatcagaactgggtctgggtctgaatgatgtcagggcaatgtgggctttgagagaaggggatcccaggcagaaggggcagcagtgagcatagccacagggagaaaatggggtgtgtggggggagaaaccggtgcatgttgctggaacatctgggagatgccagagagaatgggaaggctctgcagggccttgtgagcctcgagggaggtcaaggctgcagtgagctatgatcataccactgtactccagcctaggtgacaaggcgagatccccatctctaaaaaaattttatttacaagtaacgcatggatttttgacagcaagggggttcagcgtgccttgaacccctcgttgttcaagggccaagtgtagtaaaataaatgagacagggtctgtagtgggtgctgcaggtgcccccaggtcccactggaaccctttagggagtctgtacagccctccccctgtctccatgagcattgctagtggctggcttctgggaggacagttctgcagcttctgagactcactcctccatcttgtgcaccaggagccagaggggtctgggactctacctttccagggtccagagcccccacaggtcctcttgggatcaagctgaggctggaactctgtccacaagtgtctcccttgctcaggttctccccctccttgatcctcttccctgactcccttagcggaagccccctgggagcacatccttaaaacgtcctaatcccttacacacaaggccacgtcttggggttacttctggaagaaccctacctaagacagtttcttttttccttgcagaccttatcagagctttcgtcatgctatggtgaataatgatttcccgacggaggaaaagtatgcagtgttttgcaaaattgtttaacaacgaccaccccctttaccagaacctgcctgagctagtgttttcactgggctccctgaatgctgcctgaactaataaaacagaaagtttgaacgaactgttcaaggttgcccagcagctccgagggatcgcttcgcctcccttgaatgcacccggggttattgtagaaaggggtgggaagtgagaagagctacatttggccaaagaagtgaaaaagcctcattccaaagaattgtaaaatttattgtataagtattgcagcttttcagaatgtcatcattgccactaatgattactgatacacaacaagcagtttcttcaggcctgtggattggcatccaaatacagagtcttacgcagcggggacgtgggtgcgcgccccgcatgccacggaaagcttacataagtttaacttgaacagagcttgggaaatggggctgcaaaggagagcagttcccacgccaggaaccaacgtgaaagcattggaatcagcacaacagccatggaatcaggcaggcaggggaggacgggctgtgtccttctgagctctatagtacagcaagatttcaagcagtttccagaaaaacaacaacaacgacattttctttccttatcgacgggatattttatggttctggaagcttcgtgttgcacataggaaaaaaaatttctctgaaacgtacaattcatagggacgaccaatgaggacagggaatgaacccggctctcccccagccctgatttttgctacatatggggtcccttttcattctttgcaaaaacactgggctttctgagaacacggacggttcttagcacaatttgtgaaatctgtgtagaaccgggctttgcaggggagataattttcctcctctggaggaaaggtggtgattgacaggcagggagacagtgacaaggctagagaaagccacgctcggccttctctgaaccaggatggaacggcagacccctgaaacgaagcttgtccccttccaatcagccacttctgagaacccccatctaacttcctactggaaaagagggcctcctcaggagcagtccaagagttttcaaagataacgtgacaactaccatctagaggaaagggtgcaccctcagcagagaagccgagagcttaactctggtcgtttccagagacaacctgctggctgtcttgggatgcgcccagcctttgagaggccactaccccatgaacttctgccatccactggacatgaagctgaggacactgggcttcaacactgagttgtcatgagagggacaggctctgtcctcaagccggctgagggcagcaaccactctcctcccctttctcacgcaaagccattcccacaaatccagaccataccatgaagcaacgagacccaaacagtttggctcaagaggatatgaggactgtctcagcctggctttgggctgacaccatgcacacacacaaggtccacttctaggttttcagcctagatgggagtcgtgtacaaaccttggcaaaaaaaggttggaggagcaggagtaacctcaccaagctaggcacctccctggtagagacagggtgaggacgcgcgaggatgatggggtgtctgaaaagcaggagcccttggtggaccctgggaggggataccagtcccaggtgagtgaggcactgtccgggaacgtcctcaccgagcgacgggagtgtcactgcttcttcagtaaggcactagagacgcgtcacataaaggaaagatacgttttaatcatctttacaagtgcgtccttgtacctttcgggataacctgtactgatttctctgcaggaccttttcaaagaatcctcttcaagagagaaacaaattttaggctgacgacttcacggagaggcaggttctgctgttgccaatgaacgagaactttctactaggctggcggcatgcagagcccacgtctgtcagctgccaccttcgtaaagcacacgtttcacatgcatgagctcgagtggctagaacttcaaaactgtgctcaggtttttgttttggaagttataaaaaagttgctcacaaacaatagttattgccttttatatcttttatgttagtctactagtcagcattctgcccaaaatggaaagccactcccatgggaagggagggggtagcagctgggagtctgctcttccagctgggggccctcccacccccatggggaggaaagacgtcaagctccagccactggccccggtgggtcccaaagccccacccctcatgctctcctctggtcacctctatttacgctcacatgccccttcctgtccttcacctgcacgtcaccagcaggtcccgccaaccccaaatctatctggtgaaaacctggagaacaagagcggagtctaagagagatgtaaatgaaaacacagatcaacagacacaccagaagggaagcgttgtttccgcggggaaaggagatggaaaggggaagagaaggtgaagaattctgcgcccgaagctcgggttggtgtttgctcaactgctttactcattttaaccctttcacctatcctgggagaaacccaggcttgtcaccttttcatgttgggttgtttattggcctcttaagtgagaattgatccgtgaagggaaacagacaggaggaggtcagattgcgaatacctggggcttcctagggtccagtgcggcagttaccgcacctgccttcaccggtgaacctttagccagctgaacaaccaccaaagcgccctgcagagacaagtcatcgagccctctggcatgtccctggtagcccgggcaccagccgctgcggcttgtgaggggcaccatgctccaccccacggggaccttcacagttggaaaaaagaagaggaaaaactaattccttcggtaacagtttattttcatttttgggaaaggcaaaaccactacctggaactcggtgcctccgtggttaactttcctattttgcttgtgatttaaaggctgttctgggtcaggggggaaaaggtgtctccttcggtagggaatatataacgtggtgataacctgtcactaggcagaagcatccactctgcagggacagtggcccctcgggaaagcccgccgctcctggccaaggcctctctgcagactccacgggggctcaccctctgccgtcaggcgactctgaaattccgacatttctcccttaaagtctcaacagacacaagagaagtttccatcaagcaagcactgacatatttatattaaaaaatagtgcaaaatctcaacatttatataaataactctaaacccctgctttgtaatttttttctttacaaggtaatacacactttctgacttggcactcaaaaattgccatttttttcctcttctagttcagaaaacaacttttttttttaataggcctcttctaatacaaaaatactcctgccctcgcacatacagtttctcttatcttatatatatttatatatataatattgcagatctttaaacaaaggttttgtgcaaatatgtctttaaagttaagtgaaattatcataaacaaaagaaaataagcattcacgcacgcagctcaactagaaacaagaaagactactgtagaaattttttttcttttgccttcaagacacagctcaacaaagaaacgtggtttttttttttcttttttctttttttttttgcaagctctcttagcttgtgcattcagaccagacatcacatgtaaatatttatacacagggaggtgggaggggagggccacacgatgcgttgctgcgccccccgccttcctctcactcctcttctaagaagcgcggagtgttctgccttttcacctacgcagccccagcccggcccccctggggaccctagagagggtgtcctttctgtttatccttctctttgctccagatggctgcgctctctaggggcgcgatgtgtgtgtggtggagccgggtcccctccagcaaggagggcggcccactgctctgctggtgctggaaggaggaccccgggtagtggccgatgacctcgctgtaggtgggcggcggcccctccatgcgcccgccgctgccgtagcacgtggcgctgatgcccgagttactgctgggggggcaggggccgcccagcctggcactatccatcaggtcactgtcgaagatggttctgtttgggggtgcgcgcaccgactcccggttcagttccagctgctgctcggggtcccgaagctggagggtgcaggggccctggtagggtgggggctcctccccgtctgacagcgagatggtgggtggcaggtcgatctcgtgctgcaggtacggataggtgggctggaagcggtggaagcgctcccgctgggcgaagggcggcacggccaggcggtcggtgggccgaggcggggcgtagacctgcggctggaggaagcagagcgggagtgagggagggcggctgtctcaggtgggttgtccagaagcgatcctgagactggagttctgctgcatgggacttggctctctggggaaagggagagggcagcagggctggcgggggcgggagcccagagcctgatcccgcgggggccctggcctggggggcagcactgcagagctgcaccgccctcctccaaacagtggcagcgtccgtgctcccgtgtgcagagagcagagagctgggctgctccctcaggggcagggagcagatgatctccggcaaggaggatcccagcagcaagggcactgcagaggagggcggaggggtgagcctttagcagcccacactgttccagccgcagcgggagcagcccagggtgggatgggggtgttggaggggaggccgagggaggtctcacctctgggattccgttgcctgacactgtgctctccgagggccacaggcatccttcctgcacaggaagaaacgtacaagcagggtcagtggggtgggcaggagggacagcaaaggctcaacccagattcgactcttaggcctttaccctggaatcagctcttgaacccgcccacctctctgcatcggaaccagcttccccagcccctggccctgggcgcttttccaggacgtgagcgcaatcacctcctcactgatccctgaggtgccctctgctgtcccctgaaaatccagcctgacactttccaaaacatacacccacttgtggggcccccttctcaaagctgcctgtagcttcccgtgggcctcagtggcttctcaccaggctgaacatggcctcagcccctcacccctggccccactcccctgggcctgggccccctgctggctgtgtgacctgcgtcaagttacttaatttcaacgctgcagtttctgtacctgaattacagttcttgagattacagtacttgcctcatagttgctcaagcacttgctgaatttgaatgtaaaaaccacccggagcccacgtggcactcaggtagcatgtgaatgtgctgggtgtcacctccacactcccaccagccatgctgaccagccccctggggcctcaacaagctcagcccgagccccaggtcctttacacggcaggccaggctgcacggcccgctgctgtccactttcagttccagcgtcccctgcagacccttggagaccagcatctgaagggcctctcccgtgaaccttgtcatctgttgattccctttccagcacctgtcctaacttaatcattgcttctatgcatttatttctttacagtctttctctcccttgatctagtgagcccatcattactgatgtcccagttcacaggtgaaaaacaggagagttgaggaaagtgcccaaggcggctgctctgccataaaacagtgattcagcctctggcaaaggaggtgtgtggttccactgtggcgccaagctctggtctgggtgcaggggcacagctgccacttcatgaagcttatgccatctgctctgaggaaaatgagaccccatgccaggaccagttcctctgagtttccccaaatgccatgacggtgagccctgggcccggggaaagggatgtctgttacttttatagcttcattgaaatataactgatatgcaaataaatggacatattcaaagcatacaatttggttcgggcatatatttataccaagaacctctcaccacaatcaagataatgagtatgtccatcacctcaaacgttcccttggggcaggttttttgagggttcccaggtaggataccgctcacctgcagcctgggtaggaacggccagagggtggtaatttcccatatggccactaggaggctctgtggcccctcaaaactgtcccgtcaggaccgctcctaccccttaaggaggtcttaactgcctcgtctcctgatttagcgaatggctctgatattcttcaagttgcaaagccagatccacaggatcattcctgacagctcctctccccaccacccttgttccacccacccttgatcccctctcacttctccttctattagacagttctatccacctctctccccagcatctgtgcctagtggacagcaaagtcctatggaaccagggcctccatgtgcagacagtccatctgcagcctgcaaaaatgcagattctgtagcaggagggctggcgagcctgcgtgtctcaccatctcccagaggctgcgagtgccgctggtctttgaggtccttgaggggtctcccagggtctcctccactcttgcccttccccagggcccttcctcctcacagaagtgggaacatctccctcatgccccccaccccacaccctgccactcctctgcttaaaccgtctgggccccccgctgcctccaggagagaaagttccaaccccttaccgaggcccataccccctagatgtccacggccgtagtatagctgtttcctttaacgggttttcctatctgtatagcgggctgatgacagcgcctgcaatgcaccatacagtgtgttctgcaaggtgcccagtgaacacagactctcacgtcttgcctttggatctgagcccatcctgggtctggaccaatggcccctctttcctccctttcctgaagaactttgactggcccctcaagcctctgcccaggtgtgctaaccccagagctctccgttagccccccaggcgggtcaggcacctcctcccatctcctccagtcccctcctgcaccacagcctttgtccctctgcccccggtggcctattcaggggtctcactcgccctgcaggagctgctaccgtttccccagtgccaggcgccggcgtgctatgcagtcagggagtgctcaggttgctacttaagtgcggaagttgctgggtgacccgtgcaagtcatctttgtggaattaggttccaaagtggcttgagaagtcgggggaggtgggcccagcttcagaattgtctggaaccttccccagcctctggctatgtctgccagtcaccccaggtggaggacaaggacaggttccaatcctacagccactgctgacgagccccctgctcccagcagcctccaaccactcccagactcccagggctcggggtggactcctcttctttgaagtgggcgcacccagtccacctgcgccttccccatttagatgcttctagaccaagggtctgaaaactgtttccataaagagccagagagtaaaatattttctggtttgtgggccggcgggtctctgtcataccactgaaccctgctgctacagccaagcgcagctatgggcaaaacgcactcgaaaacacttcattcacactcagaaaagacctcattgacaaaaccaggcagccgcagtgagctgacgctcaggcagctcctcccagacccctccagagtcttaacaccacgaggccagaacgtagctgcccattcttcccctggagtccccaggaacatccaaggggacgggatggccttctatcaaacttcgaggactcagagatgtttctaaagaataaagagatgttcctaaaaaattcggtacctcccatgtcctcaggagatactgaattcccccacagcccagcacaaggggcctgggggaattcggtatctcctgaggccatgggagtggacgctaggtctttggctcccgctgctggcagattgtcgcacattggcctggccacagtcttgtccctgcccctgggaaatgggcccttggtgggctgggttctctcgggagcaggagacccacactgaggactgattgggggataaagaggacaaagggtcaccccatccaaggcctgagttcctagtctgagcaggccttgggcacaaagactgggattgcctttctgggtaaacctgaagtctgcgccactccgtggctgggcggtcactgcagtgacgttctgcatcatgtcccgaataccctcggagcagcgccagggtggaagtgccatccctggtcgaggggcttgcctgcactggagcctcaccctcagagggcagatccttgcccagtgtcacacaacaaggaggtgacaaggccgagaaaagacctcagagctcagggtcttacctgagatggtgaggcaggtgggtgaggcacgagctcttgtctccatacaggcaagaggggacccccagggtcaccctgaaaaggggccatggtcggatagccatgccaggggcagagcatggatgggctggggggatgtagactgggcccgggacagataagagctgtatgtggatctctatggaaggccgcggggcccagggactcctgtctggcagggggtccccaggggagctgccacattctgctttaggcctagtgaggctccacgtttacccagccaggcatcccgggcggctgtgcaggcggctgggtagacagtgggaggagactttctattggccgaaggtgtgacggaatcctaccccttcctggcagcaggatcccaggtgccgtctcctgctccacaacagtgaagcccctgcagtcggcctctgggtacggtacactctccactaactgcatcctccccatgaccacgggccgcacaggcctagcttcaacccactgtggagatgcacacactgaggctccgaggggcaaggtgagtccagcctggagttagtgcccctccagggctggtgccttctggaatgtccaggcaccgtcactctccccagcacttgagggaggacggaataggctgtgggctcttcacaccggcagtgacaagcagtgtggcctccggcaaatgttccacctctctcatccccagtttctcctctggaaagtggggtgaacccctgaagtccctgatggcatccctgggcagacgtaaccagtgcttgttgctggagtggtagcaacagcaaataaacacgtcggggcttgagagcagcaggtctgcagcacgccctccggacagcgtgctgggacgcacagtgggccccgggtctgtgggccaggcattcccatcagaggtcccagggctgatgctccttgccctggcaacctggtgacgcactgaggctggggcctgatgcaagcagaggtgtccagacctgccagggacaggccttccggctagggactgtggccaacaggcttctcagctgacttggctcagcccagggactctgggcgccaccaccaaccccaggcgtccccagaagtggggaggccacactcagtgctgcctgttctgtgagtcctccccacacctggtgagccccggctcagagacgtgccgcagccccagggctggccacgtgccacctcctccccacagttcccagcctgctctttaaacagccgcttcctgccccacgtggttgagttacacatcctgggtgcagagatggaagccattaagagattaactctgtgccgccctttggtccacctgctgaaggataccgaacagccgggcttcaggcggccgacatggagccgggagttcaccgtcagaggcgggcaagttcccaccgacccagatctgccctgtttgcccctgactttgtggagattcgaaagggaaattcttggggtttccagaacacccaccaatgctcacaactctgagagatcaacacccaggactgtaatggagagcggggtccctcctgcagggctctgtcctcctcacactcccgcgcccacttcacctggtcctgcacagcacggcctcaagagcagctcgccccaacttcctggccacggccctcggcttccttcatccgtgcacctgctcctgtctgcgcccatccaactcaccagcagcaccccctgggactggctcacagccacttcccaaacgcagggggaattttgcataccccgtgtgtgtgctgggtagagatctgtcaggtggatggatggatggatggaagtgcttttatagccagtaatgaccagacccgtgctctgtgctaaagccctgaatctctggggaggtggatgtgactgtcagcccattttacaaatgggggatctgaagccccattttgtagatcagggacaggtctgagggcacgtggccagtactggtggagatgggattaaacttaggccccgggacctggtgtcctgttgcctctatggctctccaaggcattgtgaccacatgaccagatgtcagcatagcacgggcacgagggcagggccgccacctcccttccgtctgggtcagggctgcaggactgcaggcacctttcccaccactaccccggtgggtaagagccaaatgccggcccctcgtctccaccatcctgttgtgtcaggcctctgtgtggacccagaatgccttcctgtgctgcctgccccaggtgcctccctgctttcagcctcatctctctaggtctgtctccactcagcctcgagagatgtgggtcaagacgggggtcagcttgcgctgcttgtgagcccagccctgcctccctagccgagggttcctcgcagaggctcccccaggtcccagtggtcgcatctcctgcatggcgctatcaccactgggcgtctcatctccctcctggaacgtcagctccatgacagcaaggacctgtgtgctgccctctccccaggccctgcacagagcctgcgacccgaggctgctcgagagtcagctgagtgcgtgagtggatcacgaagcctcttcccagcccagctcttcattccccacgttcctccagcatctctgaggcccgcctggcgggtgctttcctcccatttcaggggaggaagctgctgtcaggtgggctccccagcccctgtcttcctgccctgaatctgtttcctgcaaacgctgccattggatcccgtctgagtttttacaaggggcgtcccactgccgcaccctcaggccacagatgggatggcggggcacttactgaggacagggcatcttctctcctccgcccctggctgtgccggctgatgaaggaccgtgcagacagcttgtagtggctcagcaggcacgtgatcaccaccaccatcaccatcatcaccaccacgatgatgatgatctgaacaaactccagctccgctgtggagacaaagagggacacgtgagaccctggacacctgcaggtcgctgtgctcagggctcagcccttttgagctttttcacccacctagggggacgagagtgcaacccagactcaggaaagcccccgccactctcccggcaaggtcacaggcgatgcctggggctggggtacgtgcagggaagctgctctcacggcggaggagggggtactgctggctgggagagcacctcaaaggtgtcctgggacccagacaccccctctgtagggactgaccggaaggaggtaacgggacaggcaggaggaaggccctgctctctgctctcagagcctcctggagccgttctgcagatgcacagcgtgagctgactggcagaaagggagccctgcgcactggctcctgtcgctgggcaaaggctcgggcagacggtcacagacccttcttaggggcccagggagggagcagttgggaggagaaggggacccctgagtgcggagagaggaagttggcactgagtttgggagtgaagctttgtggaattaaacaaagaggagctacatgtgaacgtgtgtacacaaacctatgcacacctgacactcctacacatatgtcaacacaccaacactcctacacacacaacaccaacacaaatgccccaacactcctacacacacaacgctcctaagtacacgtcaacaccaacacacacccaacactcctacacaaataacaccccaacacgtacccctaacactcctacacacaaaacaccccaacactcctacacacacaacaccccaacactcctacacacacgtcaacaacgctacatactccaacactcctacacacacgtcaacaccaacacatgacccaacactcctacacaaataacaccccaacacgtacccctaacactcctacacacacaacaccccaacactacatactccaacactcctacacacacatcaacaccaacacatgacccaacactcctacacaaataacaccccaacacgtacccctaacactcctacacacacaacaccccaacactcctccacacacaacaccccaacactcctacacacacgtcaacaacactacatactccaacactcctacacacacgtcaacaccaacacacgacccaacactcctacacacatatcaacaccccaacacacacccctcaacagtcccacacccaagtcaacatcccaacacacacttcccaacagacacaaacacacacagacacagcgcaccacacgtgcccacacacacacatccatcccaggactcacaaacacacgccacgctcaacaggacgggggtgtcaggaccctcctcttggtgaaaaggcctcagaaaacccacattccagatggctgcggatgttgccattcgcattttctaaggttgggtttttttgttttttcttttttggtttttgatttgtttttcccctagaaggcggaaaaaccctcaagtgctggaataggaagaaggttattttgatcctgcctgagccgggcagtttctgctgactcaagcgggtctgtgccgaagcggcctcggcagctggccgagcacggtgccagcagagcccccagcaatgggcaagacgccgggtcccttggagttgacacggcagagtgggcaccagccggcagcgtccggggccaaagctcctccagcttcgccctgcccaggacaccctgcccaaggtgtgcaggaatgtgactccccagaccccggctggcatgggggcaaggaggactccccagggctccctggcactaacaagcaattagccaggctccctgggggccccagttcaagcccagtgccactgactcagttcctcctcctcccaggaccgaggaaccaaagccgggggagggggatcggggtgggcaggtgtcaggtggcaactggagaaaaaacaggccgtgcagagccgatgccaggcgctcgggccatcagacagcccaggcaagcacactccaaacccggggggcccagccatctcctgccaccagcctcgctctccccaaggcaggaaagcagcccatcctaggtgggaatgtcactgtctgtgaagtggcagacgcctctccacacagaagcactcccacacctgtgtccactgccactccttcttccccaacaggttttccagaacttccccgtctcgggcactttatgcatctgtgccaccctcagcgcgccattgtctacactgctactgagccagtgtttctcagctggggccgcgtctgcacccagggctcagcgtgccactgtctacactgctactgagcccgtgtttctcagctggggccgcatctgcacccagggctcagcgcgccattgtctacactgctaatgagccagtgtttctcagctggggccacgtctgcacccagggaacatgtggcgatgtctggagccatttttggttgtcacaactggggggtactcctggcatggagtgggtggaggccaggggctgtggtaaccgtcctgcaccgacaggactgtcccccatgacaaagaatgatccaatccagtcggtcatgctgtgggctgagcacacctaagaacgggcgtttttattatcatccccatttcacgggtgaggagacacgggctcagagggaaaagtgattgcctcgagaagtccaagaccctagagctggcgcgtcctcccactaggcttggtggggctttcccaagccccgagaaggcttcggccctgcctgctgggaactcaggccccaagccctgggccgcctgtgggacacccgcatgttcctggccaggagagatcaggcttcagacccaggtcgctgtggccacacctcctgtctccccagacaggcaggtccagggccggggcagcctggcctgattctgtagggcccaggtccgtctgttagcactcaggataaagccgcattcagggtacacacagggctggctttgtgtaacacccacgcccccccacccccggggcctgcaattccctgccccccaaccctgtgcactcttcaccccagttcccccttccccagctgtctccaggggcccagcccacatcagccctggagggagggaggtgtgtggctgtttttgtccctgtcccgggccctggcagcccgcaggacccagacagcagtgagacggtagctggggctgcagggccggtgggatgcaggggcaatggaggaggcccctgcagactgaatgggtgtggacaaaccctcacggctctcctggccccgccaggctcggccccaggggcagggggatctgacttttggacgtctgtatccacagagtgagaaaaacgctcccagaaatgagcaccgggctcagtagcgcataagagcgtcaccctggtccctgggccaccaactcccattgggtcactggcccaggaaaattcacatgggagaggagagagaaaaactctctagaaaagagaaactacaactgactgctggctagacttggtgagccaagggcctgggtccaggcttagggagatggagatttgcaagggttgccgagactacggctcaggagcaccctggagaggagcagggtggtggcagggaagcacagtggctctctcagagggcccgggtcccagcctggctcttgggggccctctctgagtccatcgcagtctccctgtgtcagcggggggacggtgggcagcagggggacagtgggcagcaggatgtgcgggggacatgtgctcagcatgtagtgctccctggaggtggacccagacacgggatgctcaattccatcctggctccaccagaacaagggtggcccaaacccatccaccctcaaagagacatgacctgctctggaatcgcagagggagcatctaatggaagaccctggagggctccctgtaaggtgggcactgaggcttttggtgcagggcacggagtgcggggcagagtggagcacaggcagagggtataggtgagcagaggccggaacccagaccctcctggatgcccctggacatgcccagacctggaggtgttgaggggggcaagagaggtgctccagccagcagccgggtcacccccacccatcaggaaggcaacaccctgggccaaggaggccccgaaatctccatccagctccagtcaagccccaccggcgcggatgctgtgcgggaggaaggctggtcaggcacagcagcattggggcccacaaacaggtccaacgaagaccacccttgggcatggggtgaggaggcaccttccacgcactttcacacccatggtgctgcttccaggagacgctcagctttaggggacaggaatgcattctctggggagtggaccatgcagtgcctgctggcgaggtcggtcgcaaaccagagacccaagggcacgcgcaccgaccgtccctggccccagccgtgttcccacctggcatcacgggagcagggctgtgggcagccaccctctccacaggcctggtcccgggactcacctggcctgggacagccacgccctgacactgtcggtccccaccccacaccaccccagggatgcctgagactcagcatgcgggcctctacgacgcactgatcagggcccactcaggccgagttcatcaagcatgggctccctccccacactaagtcccacacatccctctgggcaggcaccgtgaatccaccagcaaagaccccttgggggagagaaaggtgcctccccgcaaaggccttggagtcaagttcaaaacatgatgtgtgtatgaagcggcaccaatataaacacggctctccacccgcggcagctcgcagaatcctcttcgtgcctgcatttgttccgaggagcgcagggaggctgctggggcccattcccagtcgcagcttgagagccggactctcaggatcagatgcctcgcgggcaagggaaggaaccccagcaggactgccaacgcgaggcggaaggagagaaggcccagcgcggccgcatccctccctctctccagaggaccctggagccggctgtgaagctgtggtcctttaaggctggaacctcatttaagagttttaaaagggccaagcaggccacacccaaggcatctgcagggcaggcggcttcaggacttctggccaagagttgggccccaggtcacttagtgactactggcagatatggagccacaccaatcctgcctcagtttccctaatctgacagactgcccctttaccaaggcatggacaaagacatcccagatcaaatgcccagtatgacacctgcaggggtgggtcctaccactgtccctgacctaggctcaactctgctgtgaccacaggacacattgccaagcagtcataggccacaggggacagagcaggagagggcacacccaaactcactgtagtcactgtaagtattgtcatgattctaacacatgacccggggccactgagctgagcctccccaatttaggtaacatcaccatgcccattttgcagatgaagaaactgaggcttagggagaagtagccctagaagatgcaactaggagcaaggttgagacttgagcccagagccgccatataggaactcaaaagggggaagggtttcattctcctgctaaattttcctagctcgcccacggcgttagtccgcccgccccctgccccgggaatctgaggatgtggttctgatgttctggtccagtcctcgtgcatccattgtctgtgtgatgctgtgcgcatctacctccttgagaggaagttacctcatctgtcaaaaaaaaaaaaaaaaaagaaccaaccggggcaggggtgaaataatggatgcgagagctcagaacgggacagaacgtagcacactcaactgtcaccattgtcacaattactgacactcctctggggacaaaaagcatccctcgttcccctgatggtccctggaaatgctgaggtttgctgggctgcagagtacaagcctgcttagccaggtgttccctgactggcttctgtccccaaggtgggagatttgagctcaagtcagtcccaaaggtcacccaggatggtggctggacccaaggcccctcaggggctaacatgcgctggatcccatgtttatattggtgccgcttcatacacacatcatgttttgaacttgactctgaggcccttgcggggaggcacctttctctcccccaagggcccgccgtggcaacacaagccgctgggaaggagaaacatctcgctctcatttcattctgggcatcaaggctgtgctcatcacttggagggcccgggggctcctgccatttttcttcgtaatttttcccttggggagggtgatgaatgcagcaggctctcgggggtgaccaagcccatcttccaaacacaaaataaggtcactctaatttaatttagtgtcctctttccttgtgaataatttcacattaacaggttcgtgtgcctcgttggagaggccccatcctccttttcatggtctcctccagagacaggcacagtccctctgggaggtgcgggcacagctctgccctgtcctgtttgtcctacactggcaggagaggaaccgtgagcaggccactccctagatgccatgcaggggggccgaaccctttatgcacatcatctgattgaattctcaccgtcattctgtgaggtccgtacttatgggacccccactttgcagatgaggagactgaggctgggagaggtgaggcgaccgccaaagaccgcacagtccaaggctcagaaatgagttcctctgaccccaaagcctgaccgtttgcccgacccccagcagtcctgagtgtgattatcccaaaatgccagaaacagcgggagattgagccaagggcttgtgttgaatgtgactgatcttggggtcagtaacaagtgcctggcgtgtcgcccccaacgcagtccatgaagctggtattcatggcctgtggtacccacctctgagccagcgcagagcaaaatccggacggtgaggaaggaagcgggtgccaggagttatgggcacctgccatggcataacacagacgctgacagctgccctctcctctgcctcttcctgtgtgccaagcccctcaccacgaaagacttcaccctgtctctgagtttttcatgacaagccccgaggggcagcattgccccaatcacaggcgaggggacgggcctggaaatagtttccaaactccgaagcagatttgtgacacgggaatgatacacacgatggcacgtgtgcgatacagaaatataattgcattaaatgacctcgcagtggacacccacagcgtccagagctggaaggcctgtacgggacatgggcctgtggagtgaagatggtggctcccacctccagctgtgtctttggtgcagtcaaggagacgatggtcaggtgcctgcatttgggatccaaggggaccccacctttcagttagagctcaggtaaggcaaagacactattctttcccatccaagtttctggacctctgttcttgggggcagagcctggacctgaactgagggcagagcaggggcctcagggttcagatccctgttgggacgtttcatggctgtaaacggggagagggtcgctggaaaatttgttaatgtgcaagaagaacccacccagcccacgggggcactaggcggggaggtgcggcggcgactgagtttctcagaaataacgggggcaacaatggggtgctggggctcatttctctctcttcagctggggagctgggagcagagtccacccggctcctgccggccccatggaggtttccagaccagacgacccccctccaccgccaccccaacagtctgtcccaggggaggggcagctggcgtccttcctggttaacaagcagccagtgcatggggccctgtctggcctcctggccgcacaccgaggaattaggaattggcgctgtctgaaatttatgaaaatctaatcttgttaggcctgcctggatgagacccgcctggcggggcctcattgtcattctgcagagccccagcggccctggggttccagccacttcatttactgccctctcccctacctacccccactacatttgaataggaacccagctccctgccaccccaccccagccccccgaattttaagtacaatcaaaccagccgtcaaaggaataactttctgatcactcctggtgccatttcaaacacccccgacggcatgtctatttcttagggtaagaccttttatgggtaaaaaaatttgctctgtcttcctcttgaggtttggggggcgggcggcaaatctaggccggttttctcgtttttaaaaccagactgtactgctttcagagtgcttgctttgtggcaagcacacggctgagcacctggcacccggacaggtgaacctgggacactgtcccatgttggggagggacgctgagaggggacaagtcacgtggtcagccagggtggggactggggcccacatcagggcctgcgctggctccctgccctgctgttcttggtagaatcttgggatagaggttaacagcatgcagctagcacccagtggtcctgggctcaagtcctcgcattgccatttgctgtgaccttcagtaaatctcctggtaccctcatctgagaagaaaacggagagataactaagtcccctgtacacaaggttgtagcaagaactacgaaagttaacttcccggatggaacctcttgagtcaagaactccaagctctgggctaggctcctcctacgcctgtcccctgtccccacaagacatgagctgcaggcatccaaactcacagtgggtggagaaggttcccttaagcaggccccggtccagcgccatcacttatgtgcagtgtaggctggagcacctctgcagagtgaaacagcaaactctggatattttcaggtgtgaacctttgctccagcatatagacagctgggtgctgatcacccatttccagttcccctgggctcctcccccatgtgctctgttccagccacttgttttctgttctataaaagcaccatgcatgacccacctcaggaccctggcacgtgccattcttcctgcctggaatgatttttcctcaatatcttcatggcttgctcccttcattgccttgatcccggcccccaggtccctgcctcagactaaaacagccctctgccctccagcctccaggacccccatccctgtgcctgctttactgatctctgcagccctgatctggaagctgtatatgacccacccaacactgcactctctgcctctcccctctggaatatcagtggctcagagcgaactcattctccatggtgtcctcagcacctagaatggtgccttccccaaggcaggcacgtaatgactacactgaataaaaaagcacatttatttatttatttatttatttatttatttatttttgagacagagtctcactctgtcgcccaggctggagtgcagtggtgcaatcttgactcactgcaacctccacctcctggtcaggcaattcttgtgcctcagcctcccaagtagctgggactacaggcacccgccagcacgcccagctaatttttgtattttgagtacagacggggtttcaccatgttggacaggctggtctcgaactcctgacctcaagggatccacccacctcggcctccaaaagtgctgggattacaggcgtgagccaccgcacccaactgaagctcatttattctggtgtacacagatgagtgtgcaagaaggccccctgcaggtttgcacaaaaggtcacaatcaactgggaaccactgaaatgtccctggcagggatgacaccaccctgggaagcacagccaccggtcagtctgtatcctcacgggatgagcccaaactgggttagaaaagaacaacaaatatgtttttaaaaatacaggtgaaaccttctgatacacacctatatttatgagtgactgtccacgtctgcacagaccagggaccagcagggcatgcatgaaactgccagctgtgggtccctcgaggagggaccacagacaccaggggacatcccttccgtgtaatacatttctgcaatctcagcattttggagcacatataattatatttatagtaaaagagggaaaaaaaaaagatttgagaagcatctgtcagtatccaaaacagacagctgctcccataacgaggcttcccaggtggtctctgcggaggtgctgtcaccctgggctgacaagggctgctgcgggaggggctcggaattagggtgggaaggccggacagtctctgcctgaccctaggagcacagatactgcactgggaatgggtggggcagggaggggcacctgaccacccctccacgtgccctggctgagggccccaaggtggcatccaggcaccagacatctcgcttcctgggccttccctctcctggcctggaggtaggggtggggtggggggggtagtacatggagccaggcatgcaggctgccctgtggcacccaccggtccactgtctctccttcactgggccactccagggaggaaggtgtcttctctaggcctccgtggtgcagcacagctaatgggctggcagatgatggttctgagtgtgctgtctcaccacccggcctcaagccccaggatccacactcatgcccgctgtctagagaccacttccaccttttcttcacctggctgactcaccacaatctttcctccctccttccaacctccctccctcctaggtgccaggatcaaggctgacacgcctgacaagcctccaccctcaggtcgcatgcacacctgcaatgccccgtcggccttggtcttccccttccaggctcccacactaactcccacttggccccctgccctatggtctgagcctgtcaggctgggtgtgcctgactccgcgttgtattccgtccccagccagcacagacccaagggatttcagagatcaatgaacggcacatacctggcctctgtgtgcttctcttttcactggtaccctgttctagtttgcaaaggcccactcaggttaggggcgggctgcctttttataccacccagagagaactgtgcagaaccccattcatttccgaagctttgggagttcctgagcaacacagagaaacacgttcttccccaccgcccccccaacccccaaccagtgtcccgagtcatcacacaggaggtggacctggaggaggatgcagcgcggccgtgggtgagccctgcgtctgaaagtgcattcagggaacaggaaagtaaacggtctctagaatcattttagaacctgatgattttagaatactcctccaatgagaaaagacaaagctgtgccttttatccttcttgctattatccaaatggaaagaactaatgggatttttgtttctattgtcactgacatcgaacacctttaaacatccactgtcagcaaaatatcagtcaccgtttgaattattggcagaacggagtgaactcacagtgagcgagcagtcagtggacatgtcggaggtgcataacatccgaaagttatttaaaataaaccaaatgtgtttgttaattgaggagagtggacgacaaatggggaacgggtgggcgtgggtgagtgagtccgtggtggtgttgacggccacagtcttcttggaggatattgagcagtgcctgtcaacattacacaagcacttcacctttcaaccctgcaagttcaacttccagaatcatatccagtggaaaaattcacagaagggcccaaaacgtatatatagatatacacaaaacaaatatgtatatacacacacatatatatccctgttcatatatatatattgcatggggtgtttttcaaatgatcaaccagagaccatctaaatgccaccaaacacaccttggtacatcacattatgggatgaggccattaaaactgatgacataaatctacgctgagctctgagcaggggaaactgagcttggagctggatcatctctattgtggggccgtcctaagcagcagggtgttcagcagcaacctgggctctacccactagaggctagaagcaccatcaatccccattgcgacactcaaaaatgtctccagggattgccaaacgccccctgtggggcaagtcacccctggctaagaactgctggtccactgtctggctcccaggaattgaatccaattcagtctgataatggatggatgctggcaattattgtggggcagaaataatgaaactggaatggtaaataaaatatggatccatttttatagcaaaaatgaggataaaaaattaaattgttcatgatgacttcttctagatgaaggggctatcccttttacttttttgtattcgtaaattgtttgcatttttataacaggcataacacttctaattttttaaatcttaataacataccagaaagactctcgcacgcgcacgtgtgtgcctgcatgcactcacatgtgtgtttccaaccggccgacagtgacgcacgtatgccctcgccactcggcaagcacctcgtgctccttggtaaccagcagatgtttctctcaattactgattttcaagagcctggtgtttcctgacatgagccaggatggcgggcggcgcccaggggaggggaagtgaaccggggctccgtttccaaggctcttggacaaaaagcgaagccctggatcaggaagcacaatgcggctggtatttagccgcttctcaatagtgcctcattcaatccccggggcctcattgatgcccgccgcgtgctggagagcctctgagggtcagtcggcgacgggcaccgtctggaggggtctcgccgctaacccggggtggctctgtctttcgggagcaagaggggcccagctattctcggtctcccctggggcagaggcagggaggtgggcagatgggcaaggtcaggcgtcagagaggctggaggaagcagtgagggtctgggcaggccccttgcaccatcgggctcccaggagtcgaatccaattcagtaaacactcagcggagtagcttagcggttaaaaggaatcctggcgctgtcctgcctggatccaacccccagctctccccatggccaaacacagggcatcaggaagtgattcgttcactctctgtgcctcggtttccacatctggaaaagcggaataccactagcacccacgcacgggttgctgtgtggatgcagtggagtgaagagccataaagtacaatgaacggcacctggtgcatacttaggtgcgcagtaagtatcagccgccagtaagagggctgctccctgggcccaacatgccggttctcctgggcccccgccccgacttcatcaccaattgcccctgactgtggtccaagcctcttggccgccagcaccctggccgcactgggagcagaaggcctgccttcttggggccacacctttgcccgggctggcccacctgcctggggtgcctgccctcctcctgctgcccattctcggtggcctgcgtctaccccatttccaatggcccagcccctgcagccacttccttctctggctgtctctggcagttttaaactctcccatgtggtggttaattttgtaaataccacccaagacatctgctatgacttctaagaaaatgtctaagtcatgacttagcctttcctcggtctatgtcttgctgccatcgttggtgtggccactctgtcagatgcaatcgcctcgtcctgcagcctcctcaaagccggcatgagcccggcatgcaggagtccagtctctaactggtagactcctctttaaccctcaaagcccagggctggtcgcctgagaactgccacatcctgcatagtagtagtaactactgtggtgtcaagcacaggccaccaccacgtgggactcccagctacaaggaaaagagtgtcccatcatgagtgtccctttaccagtgtccctggcacctggtccacagccagcaaagagacccacagccagtcaacacatgatcagccaagctactacctccagagcagtacagaggctcacggtgtgaacctggatgtggcacacacctgcaccctagtccggaccctgctacctgccacctgagtgctaccctcccctctctgggcttgttttcccaccttcagaccccaagagcaaatggggcctcactcatgcaaccaacatgggagttccatagtaaatgcctctcccaaagcctgacaagtggtggccactattgggttgttgctaatagtaacattatagaggtggccattcccacctcccttcccaaaccctctgtttggagcagaaagcaaaggacctcgtgttatagacctctgtgcccctccaacatatgttgaagccctgacccctggtgtggctgcatgtaaagacggagcctctagggaagtaattaaggttaaaagaggtcataaaggtgggggcctgatccaacaggattagtgacctgataagaagagacagcatagagctcattctctcccccctccttccatgtgctggcaccaaggaacggccatgtgaggacgcagccaggaggtggccatctacaagccacaaagcagttctcaccagaacccaaacttgctggccccttgatcttggacttcccaacctccagaactgcaggaaaacaaatgtctactgtctaagccacacagtccggggttattttattacagcggcctgagcagaataatacaccttgtttagacagacagagggggctgaacagagggaaatgagctgcaaggtgaggaggcaggacccctgccctggatgatggacttgcagaatcccagctacacccctttgggacagaatattagcaacctgccctctgtctccatgcagggacgcccagggggatgtcttattttattttccatgaaagacattttcttctgtcatctaaatctatcctcaggccctttcccttcctattccctcactgcggcagcgcatatatttatcgtgcccctgctgtatgccaggccctgcatgagcactgagaattcacgatgattgaggccaggcctcaggagcgagggcacgcaaattctactgtgatctgtcctctctggagcacagcaatttgatcctgtaccccagaaatcaggctggacttatatctggacagatgaatgtggacatacgaggaatagcttggaatcttctaaagccgttctgaccacagtgaacgtgcagtaggtacagtgagctcctgctgtgtttcatgccccatatggaggggtttctgtcatctcatttaattttctcagcagcttcccaggaagtacgcttgtcttattatcatcccatttttgggataaggaatctgaggctcggagaggtgcaacaatgtcaccgcccaccctccacccgtcccgcccagaaaagtcacagaagttcaggtggcaagggccagactttccctgtgcctgggacacagagcccggtgctgtgatatctgttctcactagtcacaagagtggacaacaaactcaaaacaaagtacccaccccgaaaagcagcctccagcagccccgacccctccaccggcagccatgccttcacctcctccgacctcttggaagcagcaaaaggcaaggcctgagtccgtcaggagcccgactgagctggaaggtcactgccatcatgacccacgtgccccccaaccatgccaacttgctgaccctagcctggcgcttggctcatcaccttcatgtggggctcagaggcccaggaagacccctggcccacaggcggggcattccttgctacgagtgttttccggtttgggggaggagggtctaggaaatgctgctggccacactgacagtcggcccctgaatggattgccgggcccagcggcagcttgaggagggaaggagctcagatgggaagggcgacctcgctagagagggggctccagggcagcaaacgtgtccaagggtgtctgtgtgtctgcctcccacctttgattgtttgggggtgtgtcctttcctctggggcatctgtctgtctgtctgtctccggtgtgtgactgtctggggtctaaatccgttgagtctttccctgtgtctccatctgtatgagtctcttcctctttctttttcaggcaacgtgaaaaacagattccaagaaggaagttctaagcctcccagacatcagccgcctctccctgtccccgccccacaggcgaggctattccagcccttgctatcacttcctttcgaagcagcatcttccagaagcagaaaatcccaaattctgggaagacgaggttctgaccaactgttctgcgaaggcagcaggggaagcttccggaggtgtcttttctctgagcgtcgagatggggacacagcaaagctgtggaaggcagggagcctggctctggattcgaatccagatgcagccacctgctgtatgtgtggtgtctgtggtgacctggccccttgcctcagcttcttcacagtaaggcacgaatcaacaacagtacctgcctcacaggactgcttaagggtgaactcaacagggacataggtactagctctcggaacgctagctggtacacagcaagtgcataataaatggtgatcatcatgacatggcaaagcaggcatcatgacatggcaaagcatgcatgctgaccgggcaagcatggtgaatgcgtcaaggatgtcaggcgcacgtttattaacgatctggagtgactgatactgagcaggtaaattcaatttatagaatcacaactggtacgaaaagaggaagaaagagaaatggtgagaaaactcaagaaaccagaaacatccatcagaagacagacctagatgggagctcacggtccagctgcagaggctcaaggggccgactggctggggatcagctctcctgccctcgaggggcggagctgtgggagagccactgggagctggaccccccatgacgagaggcctccttgcactgctgagcacccacacagagaccctgtggccaaaggaggaggagagagaaccttggcgttcatccctcaagagcagaaggtttctccacgtggcctccttgtctccctacttcctctcttgcaaacacaccccccgtctattctccaccctgcagccggaacaatctttaaaaaaaatcaagtctctgacttcccacactatgctcaggttaaaaccctgcgaggcccaccccacctcaccactgcacttcccatctccttcctcgctcaccatgcgccagccagcctggcctttcgcctgctcccaccccaaggcctttgcacatgcagttttgtctgtgggaagacttgccctgggtctgtcatcccacatgtgctctcacctcttctcttactctgcatcgcctggtggcctgtcttggtcacgaggggcagtgcagagtatggtcaggagcatggattattctggctgtgggagcagctgtgtgtctccacttccttgtctgtaccatggagtgaactatggccccgtctcattgggttgtttgaggatcgtaaagaacccagaaagcacctggtgtgtaggaagcactgagtacgtgttggctgctatgagaaaccatcttctttctaagtgcttgcttgttcattgtcaagtgcacctcaccagcaagaaagcgcctcgatgacccttatttaccctggcgctgtatccgtgagggctaacaccacacctgacacaagaagtggccctcgattaacatgtgaaagaggaaggaatctctgcaaaatgtccattccccagcactcgcatctttccaccaaagccagagaccagaggagggcatggatgtgaatggaaactgaagggtctttcaaaaactaaatctgcaactcccatccgacccagcaattgcactcctgggcatttatcccagagaaatgaagacttaatgttcacacaaaaacctgtgcatgagtgttcacggcagctttacttttcatagcaaaaacaaacaaacaaacaaaaaaaactggaagcaatccagatgtccctcaacaggtgaatggttaaactaaccatggtgcattcataccttggaacactacgcagcaacaagaaggaatgaactactgacacctacagcaacgtggagacatcttcagagaattacgttaagtgaaaaaagccaatttcaaaaggctagatagtgtatgactccatttctataacatgcttaaaataacaatattatagaaatggagaagagattagtggtttcatgggtaagggggtggatacagttagaaaagggtagaatgagatgttcttgtgatgggactgttgtgtcttgactggtggttacacaaatctacgcatacaataaaactgcattgaacgaaacacacacacagacacacacactcgaatgagtgtgtgtaaaactggggaaaggtaaggttgatggtttgtgacaaatgtcaactgctggctttggcactgtactacagttatgtaagacggtaccattgggggaagctggaggatatctacatagaacctctctgtattattttttacaaccgcatgctaacaaacaattgtctcaaaataaaaagttttctgaaaacaagtgaacggtctgggagtgccctgtcccttggcatcaccagaatcgccctggcagaggctgaggccagcagccttaagcggtccttagggcctggcccaggcctggcactgggggagggggttagtttcctgcaaagggagggtaagagccgaaacagaagccgcttccctctctcgcagcctccctcgcctcccgctcacagcatctgccatctggctgctgcagccacacgaaaccatctctcggctgtcatctctccacttgcaggtctggctcccaggtttgaagattaaattctaaacacgtcatttaaaatttagaaacgaggaaaggagattttaagtaatctggaagcactggctcctattgtctgccccaagtaataagcatggaacctccaacctctgtcttaaaggtgacaagagccaggggagggagagcagcttgggattccccgatgtaaagtgtcactgcctccccaatacaatcaaatactcccaaaaggatgtcccaaactaccactgtacccccaagagaaagcatcactgtaaagtatcaacatattgttcaggaagaactgcggacgtctctgccagtgagcacttcaggcacagaagagccaggaactgcagggatctctgaacaacacgagtgtttttgaagaagagtcctcctctgtcttctccagaacatggaacagaactagagcaggtttgtgataatgagcacctaggagcggggacctccttaaatgatctggttagggacagcctttcggaggaggtggcttttcagcagagaccttaaatatgaggagagttggggaaaaaacactcctggccaaacaatggcaagtgcaaatgccctgaggtaggaaacctttgtctcattcaagggcaagaaaccctacctcctggggcatagcatgaagatacaatgaggagctagctgctttggggcttggcaaagctgcactgagacttcctgcaggtggccatgggtgtgtattggggcaaaggcagcatagacaacgtgaacttgaaacgattcaggtatcattttccagtgtgactctccaaacacggcacacatcagacctgctggggaagctcctttcagacaatgcgggagccgtgtccaacaggctgaaattgacatcgttcagtggcgggttccgggacctgcagggaatggacttacaagcgcccgctatggatgaacagattccaaccaggcgctcgcttccttagtgaaggaaccacttgttcaattatgaagcccaggatgtgaaagcaactgctggagccacataggtgaatttgttatgctggaagggggtggtcacctggcactgtgagtggctcagagatccctaagtgatcagaattgtaaacgacccaggggaaaaccttgggaaaaaactcaccctcttagatactgagtttctaggggaggagagtggcttagaagcccctaaaatgggtcagatgagaaaaggacagggccagagagggggagggagttgcccagagacacagagcaaccgtgcaaagctggctagagccagagcctgcgccttccagttccttgggtacaggctgtccacgcaggcatccctggtgggagtgagggtcacaatggctgtgaccttgaccatctttgcaaggtgagcctagcttgtggcatggagtctggcttgcactgcaagccccagggaaccgtcgggggatgagtggatggtaaaaacgacttctgcccgtcagacactcagacacaccagcggggagagctgcagccactccagctttagctgggttgtgctaagagctttaagtgcattatatcattcaaagctcccaaggagccgctttggggagtcccgtcaacacccgcattctgcagatgaagggactgggacctcaagggcagctgctagggctaaggtgtggttcttctaccggagatgattttgccccaggggacatctggccatatctggaaacacttgtggttgccacaactgggagggggtgttactagcatccagtgggcgaggggaagtagctaaacatccaccctgccacgcacagggaagtcccccacagaaaagaattattgagcccaaacgtcagcaccaaggtcgagaaactctggattaaatcagatgatagtgaatatctcaggcacagtgccgggtgcatagtgcttgctcaataaacattagctaggcaacagctgattcctaattaggcctcaatgtgaagacagaagcagggactgaaaccacacacaaccggtttgaagaataacaacaacttagtctaaaaacatctgctttgaaagcaaacgcttaggaaagggcagttgttcatttcacacttggattgtacatttctgtaggctggagtcgcaaccaccttgatcaccgatcaacgcacactggcaccaaccaccatgccagacacacaggaggcacttcgtaaatgcttgtgaaatgaatacatgggtgagggaaagtggcggagagcagtctgcgtgaggacgtaagcacaggtccttctctggaggcaggagaatgaaaatcatcccacgggtcggggccgggtcagtgaggaagggagggaaggagttctgagaatgtcaatctgcaggacaacttctagtttccaccttttgcatgagggatttccaagtgccccagggcctgggagtccccattcatcaaccctgggtgctaccagggacagggcccattgtgatttgtgaggcctgcctgagtgctggtggggcaggggtgaggcaggcgcccatgctccttcctgacctctccagcacgctccatccacttgcatggaatcacggcagtggggaatgagaaacacccctccatcactgccactgggaacccccgtccctccaaacctgccgcctgcctgagctcctgagggcaccctcaccctgcatgggcctccttcctgccagggagggagccctgtgcgaggcaaccaggggttgccccggagccagtcccacttctgccatctgcgggtgacagcgagagacctctctagggtgtcccctgcctgagacgaccgtgaggatggtgtggcgctgcctcttacaagggtggtcccagcatcaagaagggaacggccctcccagacctttcactgcttaaaataaccaactttttaatttagcaaccattgtcgtttcacgttcaattctgtaagcaataatagagctctccacgtaccctccacctcctcccctgctggcagcaccttacaaaactcgattctctgtggttttcccagaatcagaacttgtgtacgctttagtcaccccctcattttacagaagaaggaactgcaacctggtcagtcccccctcaaggtgacacggccagctgggaactggacatggccaccacacctagcttagcagacctcaccctctcggcttctcctctctgcctgaggtactccccccaaggtcttcccaccgctgactccttctcatccctcattctcagcacaaggtcagccctgctgagagaccctctcagaccaataaagcagcccccaggcacagtcatgtgacactgtcgaatctcctcctccgttcagtatctgactctgtttcccatctgcaccagactagtagctccctgagggcaggctcaggcctgttccattcaccaggtcctcccatctccagtggcacagggaaggagctcacctactggataaatgaacagaagatgggtgattcgcccaaataccgggtctgtcctccttccttaggtcactattacacacagacagacacagctaccttcgatgggaggtgacggcgtagcaaaggctcccagtgggaatgaaggcttgagctgagtgtgaatggtgctcagagcgggggaccagctccaccagcggttccctgtgtgaccttgggcaagctgttctctgagcctcggtggtttcatccataaaatggggaaatgacagcccgctgcccttgcatacctaagcacaaagtcactggtaactaggggcccaggttctgggtctccctggagtgtcggggtcctaggcgccggcccagaggagtttcaaagtcagcctttaactgccctcccagtaaagaggctgctgaatgctacagagcaggctcccgtgcccaccgccccacacctggaagacgaaaggacacgagaaggagaggcacagctgcgtcgctggctgtgacccacactcctccagtttttgatttaaaaaaaatccctgaaacagcacccactccctgtcaagtctgtgtccccatcgccagcagaaaccaactcctcctggaggaaggaaagttcaatggatgagctataaatatttctgctagatgctgcctgggagctgggctttctgcatgagcaggccccgctgaaaaggaaggcggctcgccagatttgtttcgaattatgaaaatagatgttgtctccccaccacatctgttttgcctgacaaatgagcagcagctcgcctcctaaataaggcagcacaccaagacggtcttgaaactccggcttctccaactcttcagaaaaggagaagaagaagaaaaaagagtccaagcctcccaggtttgagctctaaaagccagacctttttcaatgtcatctctcacgccgcagtctccgggggcatttacgccacacttgtccttaagctcagatctccctgagcaggtagaggctgctcacgttagagggcacggatatcccccactgctttttaaaaagaaaaagaaggccaggagacacgcgatcaattataaaaagtgcaaagaaaggaaagctccctaaactcaagccaagggtgcgtttttgatgtgctgagagaggccagtttttggagggaaacatcaatactgttgccattcagttctctatgccatgctggcctggtgacttgggttaatataatcattttcctttaattactccaggaaagacccaattacagcgcagacgcatctgccagcctgaggatccaatatttaatagcccatccttcaggaacattcctgcttgggagcttcctggagcgagcagccctgcatgcattacgaacttgcattactatactaactcggtggtggtgttctggcctgtgtgcgtgtgtgtgtgtgtgtgtgtgtgtgtgtgtttcttttaaaagtctcttcccctgaaaatacttcatgttgatatttcttcttaaagatgctgtaattatgagagagcagaaagaacccccgaatgactgtataacttgaaatattacaagcacagtcaccccacttccccactccgcggggaaatttacaggcttccaggctgccaccaagagggaaggactagagcccagcagctctcagagttcttggagttctcggcctccgaagcacactgtccagccacctgcacaaagtccatcataaacccatgcggggcacaatgggagtagctgctcaacagaccactcctgcctgtgggctgtctgttttgggggtagaaataaaaagatctggccaagaaacctggagtgttatgggatgtccttctctatctcctgcagacgaaatgtcccaccacgccccacccccggctccgcaacaccgcagtcaagtaggctgataggttagactcgcttcatctggcagaaatgagacgcagtttagggatcccaggagacatctggtcagctgcccacgcctgactccccctccccagcttttgtgccccctaccaagtaaaaaccggagggcagattgatgactgcgggaggggaggcgggtggaaatttatggctttgcagcaggtcaatggtaatgacaatagttttcacgggtgggggtcggggagttaggggtctagctgggaggggggcagggtgacttctctccaccccgcagccctcgctccagaagggaactcggaagcctgcttccctcctgacctgaacatgtagcgggcctggaagtcaactgaatttcccaagtccactgggctgtgtagctgcctaagaaggaggggggctctgagaaccgcccccaccacccactgcagagtctgaaggagccaaagtgggaccactttctggttgctggcaggacgatgcctatttggcctctgcaccggttcctgttgggcgggtgatgggtgattggggggcccgggagaccctccacccccatagcttgccagtttttcactgcggtaacaatgacctagtcgctatggcaatgaggttaattaatgcatctatttggcagaactaaaacctcggacgcattcaactagccctgatattttcatccttaagaagccaacctctggtgttttatttgtctaggcatgtaggcatgccacaaaacaaaacattgccacaaaaggaggagctgtaagaagaaatgggggaagttgtggggaggagctgggaggggggggtctctgcccacccctcagagagaagaaaacctggaatgtcacttttcctttttcgatgatggtataaaattagcacagtcaagtaaatgtgttataaacacaaagatgctgccaggaggcaaagtgccttcatttaaggagaggaagaatggctgaggggttttagaaagggggctgggtggtcaaacggttggagggggtgccgtctgcaaccctcccaagtactgtaaccagagggaaaagccatttcccccgagaacgtgcatctgcagaacgtctagacagtcataaagaggacaattaaaaaaagaaaaaagctgcaagccgcagtcactctcctcgccagggtacccacccggctgcaacctccagctaactgcccgagcaggtgaaaaattataaaagcaagaaaagccagtgtgggctaggaggaggccggggagtctgggccgaaaacagtttatgagcaagtgttttgaaatcccgctttaaataagccggtaaatgaattcaaccttgtcagatctctctcccctcacgcagaccaaatattccgctggcgtgctgtctagacacagataacaaaggactttttacagcgcacagagacgcgctgacaaagtagccatttaaagatgcagtattgctttctcggcctaaaacgatttgtcagatggacttaaatgaaaatgctaagttatcggtctggtttggggtctgctggtggactggctggggggagggggctggctgctccagagaactagaaaccatcatctgtgattgggctgccctccaggtcgctcttaaaataggactgtacgtggccgcccagcaaataattctggctcttcttgttctgggaaggcgcctgctaagatgtctctaacacctagtagcagcaattttgttgtagcactgttcacttaaagggggcgtgtggcaaaaaaaggttacatgaaaatgcatgggggagaacttgtttccacctgctccgggtggaccagaaccaagaggagaggaatctggtctcacctccaactttgcattttagcccttctcatacaaagggtcactataaaatgagtcaccctcccttcccaggaaagaaagacagggttggaggtgggctggctgcaagggtgtggcccggggacacactcagggtgacacccaaacaccctctaaactggggagtgggcctccatgcagccaaggttccaagggaggaagaacagcatccaggagctcccagagcctcaacacaagccgtgcgctgacctctccttcaggttacactccggggcagccggacaggggtggttctcctaaatgggggaactagtttcttcccctgggactgtcagcttccaatctagagaaagacctgctgcctgccagatgcccagtgagggctcattcactccagcgacctttctctgatggggtgccggccaagcggtcacttcctttccatgcctgccctgctcatggcagcttctatatgagactggtctgctctccttcctctgtctttccttcctgtcctcccttccttcctttttctctctcaaatgttgtaaagcccagacgctggaaccagacaaagcccatctccaccaccttcaggctgtgtggtccaagggaagtcacctccctgagcctcagtttaccctgctgtgaaatggggtctcaaccacctgtcctaaagagctgttgtgaggattaaatgcccttgtgcattaaacccactaaccagccactaacacggcatccaccggcctctttcaacagcgaggccctgggcaggctccttccccctctctgggcctcaaggccctcacctgtgagatggagtgaccagaagtacctgcctcaatcccatgcaatgaagaggagatgacagtgcacaccaaagagtggagctcagtgctggacccgcagtgaacaccccacaaacaaaaccatggtcaggcttaggatccccaccaaaaacagctgtctacactaatcccgtgggaaggacagtgcaccagggagatacacccagaggacttctccagctgctccttacagcagcctcccaaaagggtgatgggctatgtcagaggactgcagagttttcccccatttctgtttttggtttccgcactctcatttttaataattgcttttaaacgactgttcctaatcttcgctcctcttgcagcaagcagcccacaagctctgccgtctgtgggcacagcctctggttctgccccagacgtggatgtgtaggttctagaaccgatctgccaacgcggaggaatgagttcaagatgtggagcaatgttctttttccgttaaggggttcaactgagcgacttccttcttctccaggtgatctcctgtgcctggggcacctgtgcctggggctggtccaaggctccgcaagatagcacatcagtgaagtgacccagaagccactgactcagccctgccatttaacagagggaccccaaggccagaggggacatgacttgcccagagcaacccaaccaggtcaggaaagaacccaggtgctttttgcatgtgtgacttcccctacacatacctacagccactccctggtctggcaaccacgactgacattactaatcaattgccacactccttctcaaagagcccagccctgcctccaggagcttcctctccccactgcaccaggaaggctctatccatcaggcaaatacaacttttttggccaactcttccccaaacatagtcatggggtggttgacctgaaaagaaaggataaaatactcagaagaaagatgagaaatccagcaggacaagatcaggggcatttggggagcaactgacacagctgggctccaggagtcaccagaaatatccacagcaatgtccagcctctgcacctgtgctacagggccctgctcagcctgcccttctcaactccaagctgacccaagcttgcccaaactcatttccagcccacaagggcccccagcagggctcctgagccatgagctctctctagtctatgggttccctgtccagggaagtaagtctgaacctgcatctagatcgggccctgacattggatccaccctgggttcagtgtctttccctcttcccctctcactgtgagcaccataaggtcaggccgggtggttcaggcctctctgctacctctgccctcatctcgggacggcctcagctcagcctccgcctcgggacggcctcagctcagcctccaccagctttgaattccccaggggagtaggcacctgggtgtttctccccattccaagatttctccgttttcctcctcaggtcagtgcaactactttctatttagcctcatgtgagtaattatgcagggagcaagttggagaggggggtgtctggggcctggattgagttaaatcagggttcctcaacctccacctgcctgaccttaggaaggagacacttctttgtggggtgggctgttctgggcatggcaggctgttgagttgcatccctggcctctacctactagacgcctacggggtaggcacttcctccatgccccaggttgtgacaaccaaaaagtctccagacactgccaatgtccctagggggcagttgagaaccccagagttagagtatcaggaagccacaaagaacggcaggcagcaagggctgaatgactaccacatcatcatcctcagcacccagtggtcgacctcactctgccaggcagggaactttgtgccaggcagagcctcacattcattctccctaaggaatcacggcaaatgctcacattcccatttgacagatgaggcgaccgaggctaaaagaggtacaggccttggataggcaaacactaagcctagagccagggaatcaaactggagattctgcctctctcctgggtcagtacttggagcttcttgtcactaacggccatgaggacaaggtggcttcggggatgttcccgcctgtcctcccctttacgaggcacccaggcatggtgagcattccctgagcgggtgggggtgggaattctgcatctttccccaggggtttctttggctcagacctggctgagcgctgcctctgggccttcgatccccgctggcagcccgccccagacttattggcacaggctgtggggttttatttagacggtgtcagctaaacagctctgggcgcatgggcccgagtgggcgtcagcttgattgggtttcaaaacgcgtttctgtttgggagctgcctctatcattagaaattggtgcacgttttgttggtagggctggtcactcgctgggcaggcggagggagaactggccgcctcctttgaagccagtttcccctcacccactacccaccccctctcttctatctcggcccaaatcccactttctggggccctcccccaactcctgacccttcggaacaaagggagcatgagtgtctagaccgccagtctgaacgtgagaagggggtattgtgtgaccaggacagaggcctggccttcccaggcagaaaggtcggctggggagtggggcgaggtgaggggtgactctggcctggtccacctctgtggcaacagacaccaccccgttcctcctggggagtccagcatcggacccagcaccgggaatcggacctaggtcagtgccaagatgggacagtctccaaatgaaactcggggaatcctctttgcccgtcgctaaaggaactagttcaaggagagtcctcacaactgtgcccacataaatagctgtttctcatgatgatcagcttagaagcttcaagtacattcccagctccggggacaaggggacccaggggccgccctgaatctgcctcccagggccatggggagatgctcctgcctcctactcaccctctctgggtctcagggacctgtcgtaaaaagagaggctgtggcctttcagacgtgtttgaccacagaagcctttgattgtgaatcaaagtctgattcagcagctctatatatcggagggacacagacacggcgctgctggggctgacgtgggtcccaggggccagtggctgcatcgcccggcagcagccgaggtccatggggcacttactgtgtgcgaggcatttgctgagcttctcccaacacccgatgcactcctcacctcagctccacgagctaggaactgtcggtgtcaccccattttatggataaggaggacgaggctcttgggtgaaggcagagccagccagatctaaccttcccacctgcctggctttcagcctgggggcctccatgtggaaccctccctgcctctgccagctgggctgacagggaggccagagaggttcccaagcaagcctctgacctcacctcttagcgaagagacgctgggcagcggcttggggcacagaccacccgggggggccgggcccagtgcctgcacccacccccaccactgccacccgccctgcatcagcgctacacatgcaaatgctcctgagaatatccccagagaagaaacttacctccatgtgctggaattgcaggcattttgacttttcgcctgtcatttatcaaattctttgaatttttcgttaaataaggagtgtatatcactttttacaatcagaagagccatgctatttttattgtgaagcaaaaaagaaggattaattaactgtagcaggaggcggggtctccattgctatggcgggtgtagagggtcatgtgcaaacaggtggcaggggcctggagagcaggcgcgcaccccagcctgcgcttctcctgcttgggctctgtcctgggaaacactcggtgcagatgaagatctggcttcttctgagttttgtaagtgacacgcccagccgacccccacctgccggaagtctggggtggagcctggccgtctactcctcacccaccagttggtgaggatccaggagccgggggttctggaacttgcacctcctgggagaaaatgtgtgagcatgcaggttcctgcactcgccccatttcagctcacatccgaggaaagaactactgcgcctgataaacgctgatgcctctacaccccgaggcctggggatcccgcttacaaggctaccagagaagcagggttagagaaagctggtcctggtgcctcctcctcgtccctaccggcccctcggtcttttcctacgggacttctgaaaagctgttctacagtcattggttttctggccgatttccagtctgccacactaggagctggcctgtctttttcacggttgtgtgtgtccaaaacactaggcccaccacacagtaggtgctcaatgaatgtgtcagatgagttcatgaatggcgtgaaatattgagtaaaattacccattagcgaggttcctaattgtgcaaaatggcaaatgccacccagccttctggtgtcccctcccattaacatggcatgaggggagcctccttctccccaactcttccgaaggtccctccagcagaggggctgcgctaggggttcttgtgcaggctctgaaagaggaggaacagaccgaggaccagtcaaggccccagactgactgagagttgaatcacagtctctgggctggtctaggagggcgaaggtgtccaggctatagcagccccagggacaggcaccactggcaccgctcctctcccctgagctgatgccagctcctactccccaaaactcctttcctgcttcctcagggatggggtagggagaacgttttcccccgaagaaaatcattactctgctgttgagggttacacaggttgcagcagaggtgggaataggacaggggaggcaggaccctcaccctcactctcacccctctcagaggaagaagctgcgagctaaggctgggtgcaccatctcccggtccagactgtccatttcatgctcacagaggagctcagacccacctcactggtgcccgcagccctcgttccaaagccacccccgctgtgtggtcttgaacaactacctccatctgcagagaggggaaacagaaccctgggtgtgcctgggacgggctgcttcctgaaacctccccctgggcagaactcctactcacactgcaggcctcattctcacatctccttccccgacgagcctcccaacttttcacatcccatcaccctcttctcccttttcacgggtaggtcccggggcttacggagccaccactcctccaatactggctacgtcttacaaacagaacaggctttgtttctcgagcatttacaaagcacccaggactgagctgagcccttgccacaaactgtctcatttaattcttacgatgccccctgtgtagtgggtgcctattacaatccccattttacagatgaagaaacagaggctcatagaggagacgcaaccccgaggacactcttacgtggtgaccactcactccctatggatggggtgtggcctcccctggacttgggcagctgcaagcaccaaggcacagcccaccaggtgtgggaagagtcatgggggcaggtgagcaatggtctgtcagggctggtggcaggaactcacagggcggcccagacaggggagcgaagctcccacctcatgaccaggatgcccagtactcctgagcccggtccccctgaagcccctccctgccaggccactgctccttccaagggcccaggtctgtacctggcctgcagctggcgggtcacgagcacggccacttttggccccaggaggattcaattcctcgagggctgaggctgccagatgcagaggaggccaagtggctgtcccaccccatgccagccgggtgccactggcagggcggcttgtggaagccatggtcacctggagcctgaggaacctccgtccacctcctcttgcctggatactcttcattgtggaaagaaaaggcagagatccaggccaggctaagtgggagggttctgttctacaggacagcactcagcaatgtctcagggagcagggggctgcctaagtgctgctggtaataggactattttccatctttcacaactcatgataatcaactgtttatctcaatccctgctgtgggtcaaggtgtcccaggcagtggtcaaaccgaaacctaatcagaattaacctggcagaatcagggcataaggaaacgtggcaaaactcagccaagtcccgaagtggcaaaaccacgatgttcacgcttatgttgtgagcaggccgggagtggccgcctcgctctgcgttcctgcccagcagccaggagctgtgtctgaagcccgcctaccccacgcctcccagggccaggatctcacattccagccgacctgcagtacctctgcgggctgccataaaaattcctagacaggtagtcaggtaggaggcaggcccacaggatgagcagagagaccaggcccagagtgccaagtgccctccctgccccacacaagtcagagccagtgggctcaggagctgcctcctcgacctttccccctagttcttgtaggatgagactcaagcccaggatccgagacctgcatccaggaaggtctgccaaaccacaagccagacaggcggcagaacttccccaacacctccccgccccgggacttttcctagcagtaaaagtcgaaggtgggggccagcagacggtggcggccagcaggtggcaggtgtaactgcaaggcctggggctgggacacacctgagcccttttcttcacttgcttccaattgtctttctccccagagctaaaaaggtacatgaggaggctaaataataagtcacagacctattctgcagaatatccacccatttcagacatcacagaacaattaaattaaggagattttttttttccattacaaaaagggaacatcgagatcttggttaaaatacacagagatcaggatgccacacagctgcgacctggggcaggatacagacactctgagtctcagcaggctcttctgcaagccttgtgaggaggtgttgggtggtgacggggcaccaaggaagtactcagtgaagtgctggcttctccatcatcagcagcaggctgagattcaggctggagcctcatcaccagctgggagcatctctgagctttctctgccggtgaggatgggaggtccttctctgtccacacctctccacctcccagccctgcagcagggccacagcctggaccacagaactccatctcccactttcctgggggcaacatgaccctgtgaccttgatctcattagaatcgagttgcccctgaccttcaaatagctgggtgacctcaaaaggccaaagagcaaagtgcttccatcctacaggaggagctgcagatctgtaactgctgattaaaggcccacgagggacttgggacacagctcccaaatgacactctcagccttcccgatttttgccatactcaagtaccccattaaaggcattaaaattcttcagtatttttcttttcaactgaaataaaatattcaattggtttacttattacttaacccgatcttaagcaataatactcacgaaatcgacaatgtgcttgttatatttttcctaacatacattcacatgagtacggaactattaaattttaaatgaccatccacgtgccatctccagttttctcatgtgctaccgtttgcttcgggtttatagatttcttggaactgacatgggagggtggctaggacacagatgggtgcagtgggctggacatccagtggggccaattacgagtcatgcacccttgggcaattgacttctgccctctgagcctcagtctatttatctgtaaaacaggtctagtagctcttggagggttgcatgtagcgccatgtaagacaagtctagtagctcttgcagggctgcatgtggtgctgtgcctggcacatggtaggcattcaggaaataaggggaggggggtccatgctgccctcacaacaggaggaagtcaggactgcttcccagcacttctatctctagatgaaaaataggcctgagagccacaaagccggtaagtgaggctgccatgactgtgacctggtatcccggtgccacagccacactgctcttttcttcttcttcttcagagcatgctagagtcaaggggagagggaccactgcctgtcagcccatctcactccaatgaggcccttcaaacacccacctcagcagccatgccccaagcccaggacacgaagctccacactgaggtccacgctgtctgggaggaaggcagcctcggcgtttgccgcctctgagtaaccacctccccaagacatgattcatacctgtctggggtcacccacatcctcattccctgcaaaggaatgcaggccaggtgaggcgggcaggcggtggctctgggctggagcccagcggggctggcaacagcggctgatgggccaacccagccccagagctgctggagtctgtccagtctccaaggctctgccactatcctgggccccctggctggggctgggacagacacccaggtctctggtacccgttacgggcccagattcaggttacaaaatgttttccccgctgaagcacctggcatttcaccgctagagaatcggacctccagcccagcttggccctttcacaatccgtctgccctgcttaaaactgcaggcctggcccggcgcagcggctcacgcctgtaatctttgggaggctgaagcaggaagatcaattgagatcagaagttcgagaccagtctggccaacatggtgaaaacccatctcccaaactactagaattacaggtgtgagccactgggcctggcctagcagtactcctctgattagcaccagaaggattttgtggctgaaaagtggcctgagtttcctcctccccctcaccagacctcaacttacccatctgcaagcttggggctgagggcagcttagcgggcttaactctgccacaccctggaattacctggggagctttaggaaacccagatggcccggccccatcccagaggtagtgggtctggggtgctgccacagcccctcaggtggtgttaatgtgtggccaggactgagaaccactgcattttgaagaaggctagagagggtccctccagtccagatgttctctggactctctcctcacccctcctggggagctcagatcctgcccaagcacctcactggtcacagggaccactttctcccttcagctgcaacctgttaccgacaatttctgctccctcctgctctgagccccagggatcgctgctggcacccttccaaggagggaagtgtgtggaggatgggaggaggaggaaggagcagaggcccccaaccagcccatcccttaaaccaagtgacaggcggttctgaggctcaggggaaggtgggctcgtccctgcctagacaaatgaggcacaggcttcaggaagaaagaggtatgagcctgggcgcccctggggctccaggaatgccaggaaaaccttgtgtctagaactttccccttcaaccatgggctggcaaagggtcccgcttctctgtgactctccctcccaccctgtgccaagacactgcagcccaagttcaaatcctgctctgcggtgtgctgggcaatccctggcaggtgacttagctccacctcctccatgcgatggggttgccatgaggattagtgagacagggtgtgcaaagagctcagtgagcacctgccactgtcagtaggaattgctagggttcaaaaagccgcgacgtcaccggcaagaacccagaaaaacaaggagacaaagctgttgggtgttgggttcattccctaaatactgactgcctcccagattctcccctttcttgtctttgttcctgaaccccaccctcaactccgctctgagtctattctgggaaaaggatccagagctcattctcactagagtgaaagggaatgccgcgaagcgctcagagcagagctcaagatttctgtggagagaggctggcaagagaaaatggaggcctctgtgcacatttccgtttacacccctgatttttaaaaaaggaaaatgacatattgtcaaggaaccaaggagtaatgcttactccgggcagccatgctcttcggggaggcttgctcttggagtcacccttggatgctgcttcactgaagtgtgggagttcccgctacatggtagctgaagtgtggggctgggccatctacagatggggaacgtccttagaactcatggaaggaactgccttgggactcacacagggtgacaaggaggagcagatgggagttggtcctggtggctgcatgcaccaggatttctgcagccccactagtctttcagtcagccatttgtctgcacaacttccagttttccccataaggatcatccacaacccgatggtcaacaagtgtcatcactcaagccctctctgaaccccgactgggagcagacactgggagtaccacctcggtgaggatctgagtgcagcaaggatggagggtgcaattgattagcaatgtctgttatgggcagcaagtaggggacactggatggaatgccatgcactcaacatccctcatctatactttggaagtcactaggcagctcaataaatactggctggattctacagggttactggcaaatttctcctccagtgaactttctcacagccatccaaccagcagctagacagacaccaatgacacgctttgcacttggccctaagctaggagctggatattgaaaacgacctgagagagacccttgttccccgatgcagagtggaggatgcagtgcagctatgcagatggggaaccaaccagaggaaagcactgcaggaagaaatattccccttgcaggcagagcctagatttatacggacagttggaatttggactcataattacacctctgggccatgtggcaaacaactctgattaccctctagacgggaggacagtgacaatttagggccaaagcaactaataaaattaggcaaaataagtggcaccatgtgtaagttcacacagtttggagaataatgcaaagaacgaacaaccgcaaacatctaataattgtcattgttagagaaatgagtagggaatggggcagaggctcccttacacgtgagcctaaacatttaaacatttgtttcatggtaggtccagctgatacattttttaaagaggcaacattctctgcatctgtggcttatgacttgaaacgtctctccaggtctggggtgggggcatccctcccgtgtcagcctgctcagagatcaagatccataaacacagggagagatacacccgagataggagtgcattgagctgcgatctatcctaacgatcaacagcagcaaatggagtggtgtttaaaggctggttggtgttatttcattggttatattcacccatgtaattgacaccctctccatcatctcaatacacccgcctctttttcccatatcataaacagattagaaaaccagcttcctcctatggccgtgaccctattggcttctaagctcagccccatatgaatcagccctggctcaccgtgatggcatctgaaatgactcaataacgaggaggcatagacaccaataaatgaatcatgccttccgcaagaccaaacctttggcttttacagacaccaattacaaagtagaaagaaaagaacaaagaaattactcagggtgtttgcgcaaagttgattcagacatttacagaattattaccaactaaattgtttttaggaaggcaattagaactctggccagctacagacatcagctcagcccggtgaggggaatctgcggaactggcgcggcgggcaccaagttcctgcagggttcccagacctgtgcaaagctccccggcttcactttccaccttcttctggaaagctgttccggaccttgcagaaatcctaagaagtcagcacgtacatatagaggcacacacacacacacagacttggcaagtctctgtattaacttttattttttattccttaaatgtagcagccataagaggacattgagagtctcccttctctgggagtctgaagcacatcactgaccacaaccaaactctcacgccatctctcaactgacatccacgaggtgtttcagattgaagctctgctacctgctgtataactcaggggaatgaagaaaggcgtttgctgtggccccatgcaaattctgagcctccctaaaggaagtgtggtctctggaatgcatcaccccacagggctcgaaccgaatcttgttgtctgggcatctgaaccttatgggacagcttgtgcagtctgtgggtgttgcccacatcaaggatgtgcaagcctagtgggcagcttgatgcaagaaggagccaacctgagctccgcccagctcacactctcgggcagccatcctgcttaccaccaatccctacttaccatcggcaccaacactctcgtggccatttattgagcatctactaggaattagccctgtgataggtgcttaaaagacaatttgtttaatcacctccgtgcagtaattataaatcctagtttataaatcagtcagccaagatcagggagagtaaggagctgaccaaagactccacatctagaaagcggctgagctatgttaaagagccccaggaccccgccacagtctctctccctgtgcaactaccaggtgccaggactgccccacaggccaagcaaggcgtgtggggtgcagggcagtctctcgggatttggtctagatgagcagaggggtaactaggcaactgagaccactggtgctgaaaacctcctgggggaaagagcagtttgcattgctcaaaatttctgaaaaaccgattcagcttcctacttctcttgctgccgaggacatggcctggaaaatctgatttcacctgcctgggggaacccggggcaaagctgggagaaggtcaggctcacctgagctcaccctgtgacacacctgtgggaggtgggatgtccgtggtggactccaacaagggacctcagagaagcctcccggcctcggcggttggaacgcacatgtttcgacagtccgcgttttacatatatcatacataaaatacaaatgtatattgtatatacttgaagatacgtggctctaaatataaaaacacacctttttgtattcttaaccactgacactcaggcaaattcatggctggatttgtcactttcatgctcccaaagccagtgatggaactggcccctcctggagaccttaaggaccagcagagactcttccactcctgatgctgatgcgacttgcatactgggaatccatgacaacctgtcaatgacaatagaggctgacagctgccactgacagacccctccacaggcccatgctttaccgaacatgttcgggggaacagggaaactgaggtacacaataactccacttccaccaactgtcaaaatgtttattgatctatttggtgccaagatcgtgcaacttttatcaacacaaataagcacttggcacagccacctcccctgaagccccaaaagcctatagtgggggcaaatgatataggacagtttcttaagacttaaaaggcaaagtggcatctcgaacctgcatggctgttaggtggttctagctgtggccgtccagcccaaggggagtctagcaccactgctaaggaggattgcgaggtgtttcttgctgatggtgaagagttggttcgtggaggtcacaatcaacctttatccaccatccagatcccagagccactggggattttcaacttgttactaaataaaattctcttttctgccagtagagccatttcccaagcccactgaaacaataacaaatgattttagttaaaagacatcaaaaaaggagccgggcatggtagctcacacctgtaatctcagcactttgggaggctgaggcgggcagatcaccggaggtcaggagtttgagaccagcctggccaacatggcaaaaccctgtctctactaaaaatacaaaaaaactagccaggtgtgatgactcatgcctgtagtcccagctacttgggagactgaggcaggagaatcacttgaacccgggaggtagaggttgcagtgagctgagatcgcaccactgcactccagcctgggtgacagagcaagactccatttcaaaaaaaaagaaaagaaaagaaaaaagaagacatcaaaaaaaaaaagagaagaaaatcagactatagttcgaatctttctgacatccttattagtttatggcaggcactgattccaagccacctttcttcctacccccattcccattaacaacaggtacatattagaatgtgctggagcattaggaatagctgatcaccacctgataccgccgaagttgagtcacaatagctgcttagctcggtccagcatatggcatctcaacatcacctctgagcaaactccaccttcctccgtgaggacaataaccccaaaacactcccagtctgcagcaagtgtgtgccaagaagaatcaccctaggaattctccttctgggggcctgcagcaagctctggcaatgcgtttttgccatttgatggcctttggaggactaaagccatcactgtgaaaccttgaccacccagggcaactggagcgggtgcaggggaggtgggtctgcattgacttctgtacctgccccttagctctagaagagagggcaggtatgaaactcgggcacagtttcctgcccccaatagtggaaactttggagcattaaaaatcacattttgtaccagaggtgcttttcaggtaacggtcctgacaaccccatagaacagatgtcattcttccttccacctcacagagggtcaactggagactcgggaggataccacgctcacccccagaatgaaggtcttcaaagcctgtatcttgaccacaagaatctggaatctcttgaaagttcacctgcccacttcctcccttcatccaacgcacatgagactcctaccaggttcagggacacaaccaacaacaacccctcggtgcttggtgcctggagggaaagcagacatggcacagctaatgacacaaagattcgattactgccatgacaggtgtgacaggaggaaggccagggtgctcctgggccccaaacaggacaccaggctgggggtctccctaggcgaggccctgaaggtgcctctgagtgtggcctctcagcttcccttctgaaatgactcgtgttctttcacctgtctccctacaagggcagcagctcgtagagggcaggaatttgtctgtgtcgttccctgacgttctgcggccctgggaacagcaccggaggtcagaggtgtgtggcagatggtgctgaacgctgagcccctgcggaggctgtgtctagtgatgtcccctatcaagtctacatttgattccctgggaacattccccagctactccccaaacccccgccacgacatctgttggtgctggtatgtcagagatgcacagagagctggagacagagacaccagctcctcatgcagcctgacaaggcacgtgtgttttggggagacatttccaatgaatgtcagccggtgtcttgccagagcagaatggacccaattgctctgagaggtggccaattcgtatgtgttcttccctaacaaatggtccaatatgggcttgcagtcttgggagcctaaaatagcactgcaatggccaatcttgcaaagaaagccctggagctcaggaggtcggtgtagtggaaaagaaagcctgggagtgtggactgcaaggtcagggagcttgcgtttgaatcccaatggagcatcagttcctggctgtgtgacctcgagcaagtatcttacactctctgatcccatttttgtatccgcagattggtgcaatagctctctcagggttgttttgaacactgagaaaaatgcgtcactaatacctggcacataataatctcttcacattcaactaggaaaaagagcagaagcaaaaaaatccatcagtaacccaggaacagaaaagagaagccattctgtggctctcggatagtctggggatgccccaagctcttccaggctcaccccagggtgctgaagcccctgccctggctggtaagtcattctgggatttttcccggtttggtgacaaacagttctgccagtgcctgcctgacaagaccctgacgagacccctgaggtgtcaaggtttggctttgtagtgtcatccaacgggaaaatgaggttgactgtcagtactcggcactgtcacagcttcacagaggggtgcagcccaccctggggagaaggcaggaaggagtgcttggagcagaagtgaaactgaagaccggcccctccccggccctcccccgctgcacctgttgatgggggtgggggacatcagggcctttcttttaatggtttgcccccacatatgatcacctgttaaaaatttcaattgattctcacaaaggggagccccaaaccatcagaagcttctgggctttctgctcccaggttaggctgtcttaggaactgcagccagtggggcatctggacgtcagggcggtgttgacctcacggccccagttttgtgccttgccttgtaccccctcttccagcctctgtccaccaagcctggcagtggattaagggaaccctgctggcagacccgaagagaccgtctggggcctcttgggccagcaacgggcatgctggggtcgttgccagccaggtctgcggtgggcctggcaaggacaaggagtattacacagatagtcaattacctccatgttcaaggccatgggccccagatgggcctgttgattccaaccttcccagccagtccgaggatgggcaacctttttctggtgaaggccttctcatcactaggcactctgttacagagtgaccgctagggaaccaggcagaatggaccatcgagtccaatccgccccaccatcatcgctcacctctatgaacacacagctgctccagacactaggccacacacagccagaatctctctgcaccctcagcacagggactattatcaccccactttacagacccatcagatgacagtgaaggggggcacaaaggggacacggccagcaagttttgacgcctccatccctctggccctcggtctcactcctaacccacccacagcagggcaggtcacttgatgagacagatggggtctgccagcaggttctgtggggcttcttggtgacaggggagacaaaaggaactgccagcacttaaaacccaggagttttatgtcaaaatctaaccattcggctgccctggaacggaaagatctggccactcagggcccatgtggcaatggtgggctgagcagtggccacagtgcctttaaactggactcttgcccctggttccctggagcccaccccaaagacaactgagtttgcttccctgaaccatgctcccccagcctcggggagcccctggcacagcatggtaccatccttgtcactccagagggtgcatgaagagtaggtccgtctcccgcacagctcccgcacgtgccccaaccatgcgtgcgttacgcaacactttgtaaaaagcaaaaaatgggccctcggcttcaatctccttctctcagcatgtgcaccgtacagaacccgaggctggcagcagcacagcctccgaaattcaccgtgtaagagttccttctctttgggcaggatcccagacaccgaggtgcctgcaaacttggtctctggatgctaacacctgaagagagaaggccacaccgatcctcaggtttggaccctgccaccagcaccttcctccaaacattttctggcttttaaactattgaccggactataaacgtttaaaccccctggccctgggccacgatgggagtggagatggtgggggcaggcatgtgggcacacctgaccccgtggctctggggcaatttggtggcgggtgcatcttgcagcatggaggcttccttggggctcctgagggaggcaactctgctgtagacgcttccagcctccacagacctcccgacggcctcccttctcctgggcagcggcacacaggggtccaccttccttcttttatggagagggtgcataccttcgcacctcttacaggggagaatgtgcactcttcctccttttcttcttacatgcccagaagttttaaccattcccaacccaaagagaagagggcaggaaagacagatggggtagaagctgtgtgtgcctgtgtatgactgtgtgtgcgcgtgtgtgtgtctgcacgtgtgcgcatgcaagcacccactcacaggcgcgtgtgtgtttgtacaggaacaattagttattttgtgctttgacaaatgctaaactcacctcgaccctgggtcacactgggcagtgtagctggcttaacccagacctcctgggaagctgaggccaactgtctgacctaagattcgggtcatagaactcaactcccttaataactcccctattgcaccacaacctaaaacccagacagtcagaaaacctgtgggtgaaaagtcccagggtttagcgggtccacaggggagaacagctggtgttggacatctgtattttaaccccaatccaaaacatcagctttcactaacgccagggtctctccttagaaaagcaaatccaagacgaaaacgggaaaacttcatctcaagaggaagcccctatctttccttcatggcacacaacaggcactcagtaaaagctgagtggatgagtggctgcggagtggccacaggccttcacagggacgaacgtctgacgggaattaagggtctcctggcaacgcagatgctgccctctggccctcaagccccttaggagaaaccactaactgattaaacagtggtctcagtagggggcatttgaccatgtctggagacatttctggctgtcaaacctgggagaggggtgctggtatctagtgggtgtgggagaggggtgctggtaacaccttacagagcacaggacggcctttcctgccccccaacaaagaattaccgggctcagaatgtcacagtgccaaggcactgtctctacaccctcacttgattcaagcaagtgtcaaacagcatgtgccaggcaagcccagggaaacctgggtgtcctgtgagtttctgatattttctcatatttgtttggaaaaggttggagaagaagaatcagaggctcggtgactctggccagtgggtgatgttaaaaagacagctgccaccgtagataccaccagagatgggcccagggcaggggcacctcccagaactctcaggaaacgcctcccgcgtgagcagacaccgggtggccccaggttcagtctttcccgagagcgaacttagcatccatctgggccccagaagtttgaggcaataaccagaggagaaagaccgggggtaatctctgagacgcagcagaactgaaatgaggtagatgaggttgccaggaaaaccaggtgccaggagtcctttcctcaaaagtagccgcttcaagctccaggctgacatctgcaaggctgtcactcgtgctgcctgcttttaatcccaggacccttggctttttaaaagaaagggttttcccacgggtatgttttgggaacactgaattcccaccagacagcagcctcatccctcgactctcagaaaaaatggggccccaggagtgtcctgttacagtcaagcccactccattcagcatcctgagagcagacgtggctcccggcgtacaaaggggctctgacaatttcccccagcccccaatttcaaggaggacctgctctggggcccaagtaccaaattcaagaggtgtgggcgtgcagtccaagagaaaccaccctggcctggggctggtgtgggttttggacctcgggcaaaactttccacggtggactttcctcatctgtaagtcagggatgtgaaccccgagcttgcgtaggctcctctcaggtctgaaatttggggtagctgaagaccacacaggggaaccagcagtgggtgggaagcccggtccagcctgaagacctccagccaggctcagcaggggagaggccctatcttgaaagactatagaattctagatttcatccatcacggcctcattcttcagatgaagacagtgaggcccatcatggcttaaggacctagcaaggtcaatttccttctgccaaaagaaggtatcttacaggataggagccacttggacactgcctcaaagcccaactccaaaccatccatcaagttctcgttgcaaacaactcccagcatgtactagatgaaaaacagcagccactactagttaaaagaaaaaccaaatactagcttttttcctttcttttttccttccctccttccttcctatcttttggtgtaaagaaactccaggagacaccaggccttaccacttcctcaccctagtctctcggggaaatctgatgaaaacaaactgttacagtatacctgcattttaaagactggttggttccctccgtgccttgcagctttcttccaataagtagggggctgtgtatacacagaacacaggactaactggggcacccaggggccagctggaacaggctagggttccaggtattaaccccaagggtcccaatcactcaaaggctgctggcggcggcggggcaaagtgcagagggcggcggcaaggcatttaacaagaggccttgatgtcaggtcaaaaacatcatggactgatgagcctaagaaaggacagaaataagaacaatgctttttttttttttttttaagtcctgaaccataaagagagacaagagcaaaatgatgcactgtgcccagcccttggaataagggtgacacaaggatgtgtgcccctcgagcaggaggtcctcaaggcagctttacagagcgaaaggcaaaaagtgaggcaaggagggcactgaagcagcaatccatctaaggcaagactctccaaacgtgtgcgaacgtattttaataacattctcgtgcatttcattagcctcctgagttcacaaagggcctctgggaaggcaagtcggttccgcaaacgctggctctgggcaggtcctcctggcacctcgctagtctggcacaggccagctaaggtggggtagggggagagctttccattccaggctgggagggagtgtggagaggtggatggatggaaggacccaccaccaaagcccggccagcctggttatttttaccacttgaagctcactgtataggctcaggggccacaaactggcagccgcctgcggacacttgcttatgagccgcccagacactgccttcattccacagcggctgcttctcagctccgggccccagctaggggcagcctggcccccagcagggaaggactgtgtgccccttcacctggcgtgcttcttcagggtggggatggggaaactaaagctcagggaagcaaaaggtccccgaaaaggtgggctgggggacaaggtgtaggctagaagctagaagccagaacccgggaggtagtggttcaattctccactcaaccaaatgtccacctaggtgggctgtgtgtgcaggaggtagagacttacttatctgaacttttgggtgcccaggcggctgcgttagcgacaaggttcaaaaccccactccccaccgttggtccactgatcccttatttagggccaggcagtcccaaacacaaacagccccaaactttgactcctttgtaaccatggtctcagccagactgaaccaagctgtccagacagaggctatttataggtgcgtcggggacacagacactggcacaatgacacacacacattcaagatccacgctgggccagacgggccagagctgagccctggattcagacacctggacacacacggtccccagatccggcccaaccagaccagacccccagaaagatggacacgctcaagaaaggcaccccggcccggacacgggaaagacacacagagagaggcaggaagactcggtgacacgcactcttgggcaagaccgcgactcagacccccagacaccccgagagacgccgaagacccagacagagccacgcagccacgcacactccacagacgcacggacatccactcagagcccgagacacagcgccgcgaacactccagacacacgcccggagccccagacacctcgcagaccagacagtgtctcacacgcccctccacccccgcccaaagttgataaagagccggcctaaatgctccatcgcgactgccctcagggaaataaaatggaaacttcacggatccgcccgccccaaccctcccgcgccgtgcgccgccgctgagccccgggtccgagtccgggcgggcggggcgcggacagcgggggccgtgccaggctcgcagcgccgcgggacaaagccgggccggccgccagctgccgcgagccgggagggcgcgcccggggcgcggcgggcgctgcccgggcgcagggcgttcggtccgagggggcgcgcagggcccggacccccgctcgcagctgtgccccgacatagggtccgagcccgatggagtctccggggaggggggcgtggggtcactcactgatctccatgctctggaacaaagagcgtttgcagttgcacgtgcaggagacattgggctgcccggcggcggcggcggcggtgctgttgacccccatcaagcggtgcatggacggcgcggcggcgcggcgcggggcgcggggggctcgggggcggccggggggggctccggccggcgcccggagctggggccccgcatgcaggaggcgcgcggcgggggaggcgcgccccggctcgccgggctcgggtcgccgccaagttcccggggcgccgcggggctcagtgcgcgggaccgcgctccgctgcgcccccccggcctcccctcggcagccccgggggcgtcggcagtgcccgcgggtggcgtccggaaaatgggctggcagcggggcgcgcgctgccgccggggctgagcctctgccgctagctttccccagccgagcgcctccgccgccgccgccgccgccgcctcctcctcctcattcaagtccaaggagatcgggtttcgctccgagaccgcggtcggaggcaggcagacggtctgacgtcagcgctagacggggctgccggttcccaccgcgcgggggccggggagggggcgcgcgctgcgccaatccccgccgaggttcccccgcaccccctccccgagccggggggcggggtgacgggaaacggggcgggctcttaaagggccagagctaggcggcccacgtagacccggcacccgcgcaacggaggaggggcgctgtgccctctccccaacggcggtcagcttggaacgcctgcccggcgcacgcccggggccggggagccgaactcggtgccagccgcacccgggcgggttgctggtgcgccctcccctcgcccccgtccctggggtccttgacccaggctcttggggctagcctatcttctgaggagcacaaggtccctgggggctcagggaagagaaattggagaaagggggaggaagcccccaagatggatcacccattgcctggtttcgcaggagactgtccgccttcagttctccagcagctcggggatcatggcccactgaacccccaagcgctttcacccgaacccaaggaggacgaccaggaaagacgggaactcgcgtagacacgcccggaagcccttgtcatgtaaatagctgtcggggactggtgtattgtcgccgccccagccggcgggacctggggcgaatccacacccattgtctgctgcccaaggggcctccggctggggggcgcggctgcggagttcaaaaggggtatgagcaggaggggtgtacttttagttcattaagttttaattacaggagtgctacaagaacacattcttcaggtttaaaaagatattaaaatattacataagagacctcccctccctggcccacctccagcctcttaaaaatttagtgtgtcgccttttagacactttctcaaagcttcacttatttaacaggcacttaaggagcacctacctgtgccagaaactctccaaatattaactcaacctgacaccgactcagtgtggccgaatattactctccccattttacagagcgggcagctggtcaaggaagtcgcttgttgaaagtcacacagtggtggagcctgtgtgccaacccaggaccctggggagctgcctccccctctcccacgtagtcctgattctttaagtgtccacatattcctgtaatgcctggagtttcagtaattagcagggacttagtgtgttcagagaaaaaaaaagcttttaaaaattattgttactgtgtttgtaacagtttggatagagaaggaaaagctggaatttgggaagtgaaggtggcctcggggtagaacttacctagaccagagcgaattcatcctgaagaactcagagaaagccggtgcaggaagtgggttcccgctctccctgcacaggcacagtgatgctgccagagctctcccagaaagaccaggaggcttgttctggagaagtcaagcccagggatgtggctcaggctggtccaagctctttggaggagtccaagcgtgcccagcccagagggaggttcagaggcactgaccgtcttctgtttgggaggagaagctcactcttggagccacagccagcactaggtcaggacccaggccccggcccaggagtggggcaatacccagcgtctaccccagatggcaccctgctgtgaactgggcgccctcagcccctgccttgaggaaggggcaataccaccagcgtgtcttttatcagggaagatattgctgcagtttggccgctgcaacttaagagaaaagctaaggggtcccccagcatcccttggggtgccactgcaaatactggctgggcctggagatgacctgggtcccattcacttcctagggtgaaggaggtcatcattaccacccctgctttcagccatttcttcattcattcaatcaacaaactggctgagctgcaaccctgagccggggaattcagccactccagacacagcccctgccctccgggaagtctcgggagacctggctagtctggctgggagaagtcacacgttgattgtcttggaagtgagatggcatttacacaatggaggctgcactgccagcaggcaaaaataaccagttaattcagtggcttaaagaaaccaaacctacccacaacgcttgacctcccattgatccatctgcgacaccggcagtggctaccatttattgagtgctgatggtgtcacctgggattgacttagtggtctctggcgctagttccgaagttgattctgtctggagagcttaatgcagtgttcagacctcagggtccgaacctgagggtcacccaaagatgagtgggacatagctgtgtgacctcggctgagtgctttcacctctccaacctcagtttcctcttctgcaaaatggggtggcttcatggcaccttcacgtggtgtgattgcgaggaatgaagggatcgatgccttgcaagtagaggagaaggggccggatacatcttagttgttatgttatttaatcatcttggcaaccccgggagggaggaaccactatcattttattttccattttgcagttgaggacaatgatgattccagcacagacagggcccctgacggggcagtaggaaaggagaattgctttggaaggagcataggctggactgccagcactcataggaggcttcgtgtgtgcccaggactgcgagaattaaatacaggacacccagttcagtttgaatttcagataaactatgaataatgattagtgtaagtatatctcaatttaactggatagcttgtatttttctttgcgaaatctgataaccctagatgtgccagggactgtgatgctggcattttgggcatgaagggcagagcccactgtcaggcacaggcagagaaggtcacaactccctgattctacccaggagaaatgggcagagccaaggtgttaatgggctgaggagggagggctcactgctgggagtgggagtggggagggggcaccgcgattgggcaggcctgagtccctgggaagaatgccacaagtcagaggcaaaaaaaaaaaggttttgttcactcattgaacaaacattctgctcctattcagtgtgaagctctgtgctgggtatggggcacagggctgggaagaaaaccaactccctgacctcgtgtgacattgtgggggacaaagggactaaagacacacacacacatgcaaactcatagctcaatgaggtcaggaggtcatttcagacatggtgataacaggccaaaggccagagttggggtgagatcaaggaagccctccctgaggaggtggcatctcattccacctgcagttaccaaccacccacaggtgcagccccagccatactgaggctcacaggtgaggctgacatcacatgtgtaaaaagatgagtccaggtgataatttcagagagggacgagacctgggaagaatataaaaggagagggtttggaggcgacttgagcccaaagggttgggcctcctctctggggagatgtgggctgggcatgtaggggacagtagagaggggatgccaggccagtgggggcatcaggaactgggagactctcatggtcccagcaggtttggagtttgggacacatttctcagcctggctgtggccatggggttgtgaaatgggtgtgtgaagcaaatggattgtgaaatgggtgactgcagagacaggcctttctgggactccagacagcgtgtgccaccatccgccctgcccatgggttgaatccgcggccggggggattttccagaggaaacgtcctgtttcagcaggttaaggggctttgctcccagcagcgccgcgcatctgtgctctgctggacttgtgtgcagagccagcttcgtgggagtgtgacccccctgcactctccagggccccatgctctgaagggtcgggggtttattgtattattttatttatttattttttagtttaattttttctactgttgacatcgtgaaattcctaatagttaacagtttctgaacacgggggcctgcaaatctgtaaccagtcctgctcagatgccaggcccacactggcagccagttgggaccccatggaagtcagtgtgggttttggccacagctgagggtggctggcagtgttctgactgtgcccgctggccgagggtggctggccactgtggaaagtgcctgactgagccaacaaaagtcctgcttggggagccggttgaggggacaaggcagaggccctcctcagggccagccgtgcccctgtctgcctgccacccccggcctgcctggacggagctgcctctgcagaattagtcttgggaaaccttaggcagattaatgacctcccctcccaacttagcacctttggaaacaccgtccagcagggtcattttcttcctcaggttggggttaattggggctgtcaactttcacaggttagcaactttggatttcattttttttgtcttgttttacttttaaacactagtaagagccaatgtttattgggcactgcccatgtgccatgccaggccctgttctaaccacttcacattcttccacttagtcattccacaaatatgcattgggatcctacggagagccagaaatgagctcactggatccccacgacaaccctctgaggtccaagctgatattattcccatttgacagatggggacactgaggctcagggacccaaggatgaggtggagctgggatgtgaatcaggtacttgggccctaaagcccatgggctggcctcagcaaatgatgccttctgcaccctgtctccctcctcactgcctttgactgggtcctccctggccgtcccactggactcggttggcactgtgcccctggccgtcccactggactcggttggcaccgtccccctggccgtcccactggacttggttggcgccgtccccctggccgtcccactggactcggttggcgccgtccccctcagctccacggaggcccccggggatccaccatttgcctcaccgctggtggtgtctgttcataaaacctcatctccgaccatgaggggcagctgactctgcagcggagtgaggctggagcggctgggttggtgagaggccactccagcacctgctctgggtctggcgtgggcagccttggcaggctgcttcagctcactgaacctgcgtcccctctgccactaaacagggaggagcgggatttcacagtgagggagaggcagtgtggggaggcctcagcacagggcccagcggcccctggactcggtgtctgtgagttcaccatcccctccactgctccagggggcaggccagtctggcatgccttgcttggggtctggcctgcagtgggtgcttggcaaacctctgtggactaaatgcaggagggacacctacccacaaacacatccaaatcccatttttggctgccttcatgactggctaacaagtcttcccgctcactcaccctctccacctccaagtatcctcttgcagctgagtatccagaagccagtcacctgggctagcacctaccaagaagagcaaggagcgtttgcatggtatcaaccagaaccagaagtctcagccagaaagacgtgttgtgcatgtgtggtctccactgtgagcttgtgggtgtgcgttgcatgtatatgcaggacgtacatgtgcatattcacgctgtggggtatttgtgtgtgtgtggtgtgtgtcgtctgtgttgagggtttgagggtgcacgttgtattgtacatatgtttggggtacgcatgtgagtatttgtgctatgagggtatgtgtgtgttgtgcgtgcatctgcatgtgttctcgcattttcttggttgtgttgtgtgtgtttaggcgctgatacaggagcttcgctgctgtacaaatatacaggagctttgctgctggacaaatgtcagatggttgagttctccaacagcaatccaaagatgctcggctaaattggccacagatgacacccccacctccatcccggggtgccatcccattctcttctgtccaatttttcaattccagcagggaactgaattcttcccgagaagagagggctttggaagccaggcagggagacaagggtgggcagaaggagaggacagaagggaacattagagccaattttgtcttctgacagatgggtaaactgaggcccagagagggccatgacttggagaagattcaaggtgccagtgaaaggcagagctgagctaggatccattcagtgcctgacagcagcccaggccctgcagggtctttggttaccttaaatagcttaatacacagacttttctaccacaggttgagcttgagaggggaatggaagattccagatgtttaactcatgtctgaaacactttcagaaagaactatgagtcactcaagctgatttcacggaccagaaatacccaaccaaaagtgttctgcgtctctcttgtcatgaatgacacattgtactgttattaggagtaattaataatataaaactgtgcttctcaatgacaccagagcgatttaggggaggctggcccttggtgttctgctgctgggtttgaggggaagcaggtagagtggtctgggtgtgacagcaaaggccatgctgatcacagaggactcggacatgaccgtgtctgccaggctctgtgcagtgctaatgccaggcaccacacctggcacagagacaattccacacctcgtgccaggtgctgcaacaagccgtggggctgcacagtgactagcgcaggccagctctgcctccacggtatcccctctgatgggcttacccactcatctgcccatttcccccaaacctgaattctgcatgctgaaaaccgtggggtcaggcaagtacatgttaccacttctgtgtgaccttgctgaagaaagtgaatgaactactccggaccttagtttcttcatcttaaaagtggagatctgacaggtatccatccactcatagggccagtggaagattacatgggtaactcatgcagggcactcagcacagggcctggcttggagcaagctcttgaaaaagctaattacagtagtcccccgccacccaccccatgcatggcttccctttccaaggtttcagttacccatggtcagccgaggtccaaaaatagtgggtacagtacagtaagatattttgagagtgagagagagagagggggagggaccacatccacacaatttttattacactatattgttataattgttctattttattgttaactgttgttgtcaatctgttactaggcctaatttataaattaaaccttattgtagtatccatgtgtatgaaaaaatagagtatatagggttcggtgctgtgtgaggtttcaggcatccactgggagtctcagaacgtacccccatggataggagggaagactgattaacactgcgcattgtgcatcccaggggctccccgtcccggacaaaatacaaacagaccctactaaatccctcttcttccctttggataacttatctcaaattataaattataattttgtgtgtgtgaatttgtgagtggcttcattcagtgtctctccccagctagactgtgtcctgtgtctccccagtgtctggtctagggacaaatgctgagacgtctgcaaggccatctagaacgccaggaaggcactgtgggaacccagaggaacagggcacgacggtgcccaacagtcccaggaaaacactctgtgcccttcacctacatctccatgccagggttggagacagggtcctgtcccatctgcacatggagccctccggacgggtgaatctgtcgtcagtttggggcttgggaatcggtgtccaagagctggcttcaaaggcaatgaaactggcattgcatctttgaaggcagcacaggctacatctgtcttattctccgtgtccacagcccctagcagtgactggcatgtggtcacgcccaataaatatttgctgaatgaatgaacgcaaaacaatttgcaatgtggactagtcccttaaagtatgtgtatctgcaaccggtaagtctaccacatatcttaaggaaataatcagagaagtgaacagttttaaggagaagaacgttgatcctatcttcattcgtaaaagcaaaagtgcaatgaaattaaaaacaaatagaagatgcgtaaataaaaggcagtgatcataaaactgttcaaaaccttgttttcaaaaattatctgatgatataaagtcccatataaactaaatttaaaaataggctgcagaaccgatctcaactttttacaaaaatattattagaaaaaggattaaaatgatatttgccaaaatattaacagtggtcagctttgtgcaatggattaaatgcaatatatttctcatattgtttgctctattttctaccatgagcattcatttagaaaaatttttaaaaatttttacttaatagtgcctctgaagcacctctcaagtcctacctcctgcggctcctttaacagcggccaagacaccgaagaggcgggggtgccagacaggctgacgtcatgggcagcccgaaatgacacagctaaccggccaatcccaagtttggattccgggagaagcacgatctattggatacaagtgctggtggcctcggccaatggtgggagaggggccggagcccggcggctgcgtgggttttaaatccacgtggtggctgcggggcggggcgcggggcctcggtgtttaaaggctttgggtccgccggggctgcagcggcggcggctccgaagcgcttgttcttttttgtgaaaggcgattcctccaccacctcttaggatcttgggcaagtcactcagcctcgctgagcctgtttgcatcagtagggttttgtgaggctccagcccttcaacagaacatttgctgagcatctactgtgtgcccagcagggccttcttagatcaggtataaggcaggagggaagcgtcgggagtcccaggcctgctgcctctgtaaccatgggcaggtggttcaacattacctccccttcttccccactgctctgccccatcctggcttttattgtatctcctctaaaagggtgtgagctccacggggaggtacccatgtgctttgaggaaggtctgccccagtttatattcaataggtactttttgaataattattgcaaagactagttctcagcacagagcttaacacataggaggtgtttgataaatggcaattgttcatgcaataaagaacaatagcaggccaggtgcgcggtggctcacacctgtaatcttagcactttgggagtctgaggcaggattattgcttgagcccaggagtttgagacccctgggcaatggtagtgggacctcatctcttaaaaaaaaaaaagaaaaaaagaaaaaaagaaaagaaaaagaaagacagaaatatattagccaggtgtcttggtgcatgccagtagtcccagttaattgggaggctgaggcaggaggatggcttgagcccaggagtttgacgctgcagtgagctatgattgtgccactgcactccagcccgggcaacagaacaagaccctgtctccaacagcaacaacagcaaagaagaacagatagcactgatggaatgcctattacgtgtaaagtggtgttctgggcatttcacgtgtattacatgcaatttaacattaacaaaattacaagtcttatataacaatattcacaaaaaaaaaccagattagtcaccattattattcctattttgctgatgtggaaaccaaggcagagagaggcgaggtaacttttctaaggtcgcgtggctaggaggtggtggggcttgattcaaatccaggtctgtctactcctggggcccttgttcttaacccctgcgctatcccaatacttgtctagtactcagccttttttttccaagaacgttctaagttaggcctgtgctagtgggaagtgggagaggaggggataggaatcaggtgggtgaggcagagccaggtgagctggggtcctgccccctatggcatggcccagccctatggggtggcattgggcaggaagaggggcagtgagacagacagccactggggccacgtgtcctgtaaacaggctacctgcttgccaggccctgtgctgggctggtggggggcagtgcggggcagtgctgggcatgacacaccctccctgccctcatggggctgtcagtctaaaccagctaccactaatggtgacctgagtgcagcctgcaggaggggttttggttttgcctgcatggtatttaaacactttttaaacatgaattgcctcggtccccacccctccctagtgtcacagatgtcagctttactcatgtgtcccaccagctcctgaatgccctgagcagctttgttccctggtctccccatgccagcagcccgcggggggggggtggggggggggctctgtggctggcacacagtgactgccctggctttctttgctttgcctcctgtctgtgtttgaaatcccgaaatcaccgccttgagctctgaagcccagcggctccgaggctgcaagcctctccgctggccccagatgtgcagcatgcagcttgaatctctgaggactctggtggtggatgccaactccaagtaagtcagacttggtttcaagtcccagcatcactgctaaccagatgagtgacgcagggcaagctaataaaatctgcagagtctcagtttttctcctctgcgaaatggggataatagctccttcttcatccggttatggtgaagggtaagtgcgttgatgcaggctgaacgcttggcacagagtaacactctttctttggaggcagctcatttagaaccattgtcactggcaggaagtccttccatacatcaggctgaggtctgcctgctttataacttccataatttgttttcctagcagcataaacatgcttctctctccatagaacggcccttcagtaactaagggccatgctaaacatcacggtgttctattcaagctctcctacatcatttgtggagcccattgcaaactaaaaatgccaggctccatgttcaaaaattagcaagaacttcaggttggtgacagcagaactcagagccccttctgagggcagagccccatgtggctacacgttacatcccttgaagctggctctgttctcactgggggtccatggtatggcagcatcctccagtaccacaagatggggtctttccggagctgagcagggcaaggacaggttctggctggacccagggaagcccacctgcaggtgtggcctctatctctgcagctcacagtgggaatctggcccacaggacccagcctgccaccctccagggagccgtggagatttcaggatttctcctctgcgaaatggggataacagctccctcttcatccggttatggtcaggggtaagtgcgttgatgtaggttgaatgcttgggcagagtagtgcttttttgttgttgacggcgcatatattgagagcaaagcacacaaatccaaagtcgattgtttgatgacttttcacgttgaatatacctggatcaccacctcccggatcaagattgagagcattcccgtcactccagaaagtttccggttaccgcccaccttgtttccagttactgcccacctcatttctagttactgcccccctcatttctagttactgcccgcctgcgtccctgcagaagagataaccacgattctgacttctttgacggtagatttctttagttcatgcttgactttctattgttttatttttatttttgtatttttagagacagggtctcactttgtcacccaggctggagtgcaatggtgtgatcatggcttacttcagcctccatctcccctgggctcaagtgatcctcccaccccagcctctcaagtagctgggactacaggtgcgtgccaccacgcccaactaattttttaattttttgtagagacgaggtcttgctatgttgcccaggctggtcttgaactcctgggttcaagctcccaccatgtccttccaaagtgccgggattataggcatgaatcaaggcacctaggcttgatgttctgtaaacagaatcctgcggtatgtattcttttgggtctgacttcttcactcacggttaggcgtgctaggttcaccctaagcacaaaggcatgctgctttgttctttttcatggctctgcagctttcctttgtgtgcagacaccgtgatttgtcccttctcttgtcatgggcatgggttgttcccagctgttggctcttgcaggtggggccgctgtggacactcttaccattgtctcttggcttgctccttgcacacttattctcctttctctggggtcctttgtcaggagtgggaacgctggcagagggtgggcttgtatttagctataatagatattcctgatcagtcttccaaggtggtcgtaccgacgcccattcattgccacccgcagtggacggagacttcctggtgttccacatcctccccagcactcggtttgccgctcttattaatgtagccattctgatcagtgtcacccttggattttgcagctgacctaagggggctgagggtgaaggccacaggctgagaagctcttgccagtggtcagtgaggagcagcaaattcgggtcttggcacttggtaggtgccccttacccttggagacacttgcaaatctgaccagcatgggttctgtgacttcatctaagtgactgacgagcacccagaagaggacagaccccactgcagagaaagccggggcttcctcttagacaagcccctcccagtcatcgcgttttcactcatgtcctctcccaacaaaagcgtggaacaggaaagtatctgctcttcacagcgtcacatgctctatttaaaaacaacttttgggaggagaggagggagcagaacagatgtttggccatgttaaatttacacagtgattgtaggttgcagcctcctgcctgaaagattaaaatatgaaaaaaatgcatctcagaaacacaacaataacaaccccagcccctgtggtgcactcactacagggaggcgctgtgctgggggctttggagctggagcggctccatgtcaactcctcagcaacccttggaggttggtgttatcacaccattttacagataagctatgacctccaagcctcagtttccttatctgtaaaatgagagggaggcagagggagattcaacatgtgcagagagattaaacacacacagaggagaaggccatgggaagacagaagcagagacggggtagaggcagagagcaggcagagggaggcagagacagagaccaggatggagagggagaggtagagaccggggtagggggaggcagagactggaagcagagaccaggcagggggagaaggcagagactagaggcagagacccagaggaggcagagactggagtgatacagctgtgagccaagggacatgggcacacaggcagccatcaggagctgcagaggcaggtgggaccccagtggggcctctggagggagcctggccctgctgacactttaattttggtcctgcaataactgattttgaactttcgtcccctagaactgtgggaggatcaatgctgcttgaagccatcggtttctgggaatttgtcacagcagcccaggaaacacatgcagaaggtttggagattggtctttccgatgactagggtgctttgtgcccatttcaacactctctgccctcagtggcacattcagaccacgttgacttgggcaatggtgagggaaatgcaaaggtgagccaaaaatacctggtctctgtctttggggggacttaaaacaacagcagctcattctgtcgcagtccaagaggccagaagtccagaatcacgatgccagtggggctggcccctctaggggctccagggagaatctccagcatttctctcctggcctggtggctgctggctcctctggcgatgtgtggcatgtggacgcgtcacagagatcggcaggcagatctctgcctctgtctgtgcatggtcttcctctccctgtgtgactctctgtgtcttcacttgggcttctcacagggacaccagtcactggatttagggtgcactcaaatccagtatgacccatccgaactcatgacatttgaaaagaccctttttccaaatatggtcacatctgaggtcccaggtggatatgaaatttgggtgacactgtgcaacccagtaccatcccttttttttgagacggagtcttgctctgtcacccaggctggagtgcagtggcgcgatctcggctcactgcaacctctgcctcccaggttcacgccattctcctgcctcagcctcccaagtagctgggactacaggcgcccgccactgcgcctggctaattttttgtatttttagtagagacggggtttcaccttgttagccaagattgtctcgatctcctgacctcgtgatccgccctccttggcctcccaaagtgctgggattacaggcgtgagccagcgcgcctggcccagcaccatccctttttgcaggagtcaccctctttggtttctgaaatgcggacacacgttacaatggaaacgagcacttggggctccctgtctcggaaaagttgttgaatcaatgcacgttgattgcttcagcaatctaggaaatactatgtaagttttctttaaacaatgccagtatggccacagcgccccccagaattctactattcattcactcactcatttacctcatttactcattcattcattcattcattcattcattcattcagtgttccgtccctgatgatttggttatgaccaaagcagacacaatcgctgacctcagggagcatgtgttctggtgcaagaactgacgctgaggtccccctgactctttgcttatccttctgacagcaaaagttgtcaggaaaacagacagaaacaaaaaatgcccactctggactgaattgtaaatcttacccctttctcctcacccaaagcccaacaaagcaatttgaaattccaaacctgtgaccactggacaagatcacctttctcccactgagaagaagatcagcgttggctcgggccaagtctgggagacagacaaggcctcctttcaacatcgtgcctccaggggaaccaggccaagtatcggccctccagagacagctgcagcccttggaggcctccccactgagtccacacccctggcccagggcactcaggctagctgaccggccctgctccctggccagcctcatttcctcctgttctcttgcttggtgcccctagcagccgtcttgcacctggccactgcttcccacgccagggcctttgcctttgctgttcccctgcctggcatggtctcgtcattcagggctcagcctgaatgtcacctcctcctggaagccttaccctcatctcgttatgtcctaccccatcaccctatttctttcccttgggtcaccagtaagaacctgggttgagcttgtgcagccgtctcattgtcttagcctcacgaaactgtaaaccctttgacaaaagggatctgtctggtttgtttgacgtgtaaccccagcttccagcctagcacagagaaagctccatggagacactgactgtcagatgactgcagacctccccacaaggaggagggaagctggcctccaaggaggcgcatcccacagtgcagtggtctctggccagggtgggtcattacgccattggtttatagcgccatttgcttcggccccttttggtggcatcccagggtttaaagtgaccaggcagctagtgtggggagacgggacacagctgtctgaggtcagggggtctgtatgtgcctctccggcagggaacagcctcggccgtcagaagccaggtttcagcatttaggatgcagccaacagccaaattgctttcttggttttatatataagggctttttttggtaccataagggcgggtggacagggctgcctttgcttcctggagggtctggttcctttcggggaaggtctcagttggccactggagtaacagcactgcgtcggcccatgtggccagccagcatccctgtgctcatggctaaggacaggctgttactctgttctgcgggtcttgaagtcatttggtcaagtggacttcagaaggagagagagagaaggacagacagcatccatggagactgccacagagaatggaaagagaatgggatctgcagtctgatgggctggcatatctcagcagcagcaacaacaacacaataatatggaattcagtccaggcacggtggttcccgcctgtaatcctagcactttcggagactgaggtgggagtttgagcccaggagtttgaaaccagcctgggcaacatggtgaaactccatctctacacgaaatacaacaattagctaggcatgttggcatgtgcctgtagtcccagctactggggaggctgagacaggaggattgcttgagcccaggaggtggaggctgcagtgagctgtgtttgtactaccacactccagcctgggcgacaaagtgagaccctgtctcaaaataatactaaatactgagttcatcttgcattcctcctacacgctgagcactactcaggcattcacctaaattacttcacacagttctcatgagaaccttatgaggtaggtctcagtactgtccctttttacagacacggaagtggatgcccagagagggtcacttgctccctttttttttcttttttcttattttttttgagacagtgtctggctctgttgcccaggctggagtgcagtggcatgagctctgctcactgcagcctccgcctcccaggttcaagcgattctcgtgcatcagcctactgagtagctgggactataggcatgtgccaccatatccgactaatttttgtatttttagtagagacagggctttgccatgttggccgggctggtatcgaattcctgacctcaagtgatctgcccgcctcggcctcccaaagtgctgggattacaggcgtgagccacctcagccagctgtcagttgctcacttggtgaagtcaggattctaattcaggctgttggagtttgaaactgaagctcctctccattaatggaagaacccagatttgggagtttcccggaagaaccacctggggtgggaggagaattgactggagcaacactagcaatgcccacagtaacaaccccagcgacgctaatagcctggccgtgggagcagctgcttatgagcctggcccgcagccgggccctggttaaagaccttcatgtacttcattccacgctcccagcaacttcccacagccagcacgtcacgggtgcttgggaagtgttacttgcacatttgttgactcaatcactgaacaactctaggtggccgttaattttatcgcgttttgcagaggagagcactgagattcaaaggagccaatttgcctggtgactgccctgctcagcgctgaggaccagttctggtctgggatgacgtttccatcaggcagctgcgaaattaggccacatggaagatgttgtgaactttttgcaaaaagaagtgttatttctgttacgttgatgttaaagattctcctatgaaattattttgattgcagaaagtaactttaaaatgttattattactaacctatggtggtctcttgccatccccttctgaaaagtcatgccagttggtgaattctggacatgtgggagccacttctcaaggtcacagcatccaggtacctggaatgtgagcccaggtctgggtgattgcacagctctgccacctgatcagctccataaactaaaggtgggggatttcacctttcttagcctcatcgggaaagcaaggcattacaagaacccgccctggcacattactgagaaaccaggatgaagtgaggattccaatcccatttcctggcatacagtagatgcaggttttgccctaatgcaaacccagggtcccccatgcctgagggcaggcttagaaatgtcataaatcaacccagagaagagaagggagaggcaagcatgtttgtgggggaaaaaaatgcctgtggggtggaagactacagtgataaatgaagaagcagaggactttgatttctggtaacaacgacaaaaactaaagaaaatgttgatgtacactcacagtttgtcagtggaatgtcccaatgctgaaagtaagtaggaatataagggaacactgggattggcaccagggaaaatacctccaggctgggggaagtgatccagtggcttgcaaaggtggaagaggcaagtccagccaaggtcagttgttggggaaggttgcttggaggatccttgggtctgaccacagcttcactcttgaaacttgatcatctcagctgcctcagtaggtctggtttcctgaaagccaggaccacttagcggaggtccttgggcaaatcacttcatctctctgggctcagttagctcctctgtaaaatgggtggaaacatacaaatgctgtcatggattaaagccctcggagcagtgcaaggcaccaggcagccactcagctctgcttgctgtcccttgtaggaaggaggcaaacccccagtccctgtgagtccctccccagcacctgcacacagggttgggcaaacagtcagtggggagagacgggaccgtcctggaaggtgaggggaacttcagacagcaatttctagaatccaagttctcctctgggttcagtcttaggttggcagctgccaggcacttccgggaaaggcaaataacagaattgctggtgttgagaggtgaaataatacagtcccaacagtgcacgcgcatgctttgtaagtcaagagattttgatatgcttccagctgtatccccaggatacacagcactatgcactatgcctggtgcatagcagatgcttaattaacataacttgagtcaaaaattgaatatggttctcaagggtggcaaagtacagcctgtgggccacatccagcctggtgcctgtctttgtacctgccagttacgagtggcctttacatttttaaatggttggaaaaaggcaaaggaataatattctgtggtacatgaaaactgtatgcaattcaaagttctgtgcccataaataaattattttggggaatgcaaacaggctcatttgttcacatattgtctatagtggcttttgagctacaagggtaaaggtgactagttgtgacagagacttttcagcccacccagcctaagatacttactctctagccctttaagaaaaagtttgtggctgggcacagtggttcacacctgtcatctcaatgctttggcaagccgaaatgggaggatcgcttgaagccagaagttcaagaccagcctgggcaacaaagccagagtccatctttacaaaaaatgaaataaaataaattagccaggtgtggtggtacacacctgtagtcccaactacttgggaggctaaggtgggagactgcttaagttcagagtttgaggctgcaatgagctatggttataccacagcactccagcctgggcaacagagcaagtccctgtctcgataaaaaaggaaaaggtttgccaacccctgatctagaccaattggtctcaactttggcagtgcgttggaatcacctgagagctttaaaaatcccgatgcacaggcctcagcctcagagattctgacttaactggtcaagagtgcagttgggacagaagattctaatgggcagcccaggctgagaacactccctaagtgctggctgttaatcaggactcctctttttggttgttagtacctcccaagcatgaacagggcattagagcaccatggggagagcagcgccaggctccttccagagatccctgagcccaaacttgcagactctcaggcttgtggggccagtcaggaacaaacatgggggagtgggcaggtaactgagcacgggctgtctcaggttctctgtctccctctgctcctggcaggtgggctcaggagggtgtagatgcagggctgcgtctcctctatgggccagcagcatctctacatgtttcgtggcacctggtaccatgtgctgagcactggccgtcatgcccatctattttggtggtgttagaagcagctcccaggtattgaatgcttcctctgtgcccaacaactctgtgccaccctacgatggggggagtgtctttccttttgctgaagaacttttctgaggcttgaggagggcaaatcacattcccacagctgcctagttactgccaggccagggtttgaagtcagacccgtcaggctccagaggccactctctgagtccctgtgcgctcctgccaacgggaggaagagagagagctaagccgtctctctcctgggaggctggggcgtctggtttcttaagtgatgagcaccgcagcagtggcagcggcaccgtcctgtggcttctttctcacaaatcttttatttttggcctgagacagctaatgcgtggccaacgtatcctaggaaaccaggatgcttggag[450 bp omitted]ataccttacccctcaccccctgttgcgacaatcaaaaatgtctccaggcatcaccacatgtctgctggggtttgagttgcctgataaaatacaggacacccagttaaatctgaatttcagataagcagggaattattttttattttttagtataagtatgtcccaaatatacacataagtatagcataagaatgtcctatgcaatatttgggacatacttatactaaaaaaaattcattgtttatttaaattcaagtttaactggatgtcctgtattttatttgctaaatctgccaatcctaactagggggcaacattgttcccagttgggaaccactgggctagagcctgggttcttcaccacaatgcctcagtttcctcacctgtacaatgggtatgatatcagttccaaccttgtcagcgtgtccaggctctaacacagctgagacaggttgggaggcatgtgacatgctcagcgaaggccaggacgtgctgttggggcctcaatgatgcacctgggcctctttcagcctccctgttcttctccctactttcttctgctctttgtcctggatctcccttgggtgacttgaccaaggaaacacagacaccaccctaagaatgggcagcagaggacaggccctgcaatccaagtacaagtttagaaagaaaccatttctcatggggagtgtattagtccgttcttgcattgctataaagaactacctgagactgggtaatttatgaagaaaagagatttaattggcttacagttctgcaggctgtacaggatgcatagttggggaggcctcaggaaacttacaatcacggtggaagggtgaaggggaagcaggcaccattttcacatggcagcaggagagagagcacgggtgtgaagggggcagtgccacagactttcaaacaaccagatcttgtgagaactcactatcatgagaacagcaaaggggaaaggcatccccatgatccagtcacctcccaccaggtcctgcctccaacactcactccaacactggatcacaattcaacatgggatttgggtggggacacagagccaaaccatatcagggaaccagcatctactgcacagaattccttgtgcctagttctgtgcttagaactgggaacagtggtgctaaaacacagatccaggccctgccttccacgagctgcctggttcctgggtccctctgatgcctccctccttccccacaccccccacatctcatccattggcaaatcctggagctctacttctttttaaaaatagctctattgaggcatctttggcgtacaatcaactgtaccatttggtaacttttgatctatgtatgcactgtgaaccctcaacaccatccacatgctgaatatctctgtcactcctggtgagctctctctcccgccccctctcccccaagcaaccactgatcttctcagtcactataaatgactttgtatttcctcgagttttatatataaatggaatcatacagtatgtacttttttgggtctggcttctttccttcacataattattttgagatgtgtgcacgttgttgagtgtatcagcagttcatagctttttatttctgagtagtagtctgtggcatggatataccccggtttgtttatccattcacttgttgataaatctacctcttttttacaatgcaattatgcattgaagcataacatgcatacagcaaagtgcataaaacattcatgatagtttgacagaaaaataagatctagtgtttgatggatcagaaggggactggagttcacaatactctattgtatatttcaaaatagctagaagagaataatttgaatgtttctagcatgaaaaaagacaaatatttaaggtgatggatattgtaagcagactgatttaatcttgactaatgatacgaatgtattaaattatatgtactgaaaaaaatgatatgtgaccagatgagtgcattttcatgaagtacacaccctcatccatgtaactatagcacccagattaagaaacaagacatggccagaccccagaatcccccctgagcccctccttgtccctgccttccattcccctctgtgttctgacacatagatcacactgagggttcttgaacttcatctgaatggatcacacaatacattattcttttgtgcctggcttcctccactctacgttatgactgtgagattcattctctgtgttatgtataccagtagtgtgttcctttttacagccgagtaatattccaccgtgtgaatacaccacagtttgtttctccggtcccctgttgcgggacatttgggctgtttccagtagttggccatttcagataatgcacctgcggacattgctgccatagcttttgtgcctgtgttttcatttctgttgggctgtgcccaggagtgggagtgccaggtcctagggtatgcatagggtcagctttactagatattcttcctcttaaattctttgtaagaccatttgctctccagctgtccaccaccatcctagccccagaagctgccatttgcacccgggtgacttcaacagcctttgaacaggtccctgtttacccctccccaatccactctccacatggaagccagagtgagcgttcaaaatggcaatttgggttatgttgttgccctgtcttctcatgggcctgaagcccatcaggccctgcctcgtcccacccctgactgcccgcatgagtttcttctggctgctgtgacagattgccatgaactccatggcttaaagcagcacacattatcctaagttcaggagctcagatgtctacaacaggcagcaggacccatccctttgaggggctctaggagataatctgtgtccttgccctttttcaggttctagaggtcacctgcattcctcagctgcaggccccttcctctgtggcttccatcctccaatctcctctctcactgtggctctccttcagctcccttataaggacccctgcgcttgcactggggccctggctactccaggataatttcctacctccaggtccttcacttcattatatctgcctggtccctttgccttgtaaagttgcatattcacaggttccgcagattaggacgtggacatgggggagccgctgcctctctgcccaccgccctgtcatccttctctggatacactggcctccccgctgccccatctcaaggaataagccttcttccccttcagctttggcagatggccctggcttttgcacacctggtctccctctgttcatgttttccacttgtctgccactgcattatccagtatgaccttgttcacttacctgttcgaacatttctgcatccccatcctactcctccctgcccccgttggtccctggagcaggggccttggctgtttggttccccgctgtggctctggttcctaggcgtttcgtgactcatggaaggtccacatttgttgcctgcctagggccttccgtagtgctgagcactctactcatgcttcctgggtcaactctaacagcaaccctctgctgtgagtgccagtaacaggcatgaatttgcaggtgaagaaaccacagcataaacaggtgaagtgacttgtttgaggtcacacagcttttaagtggcaaaatcaggattcatgcccaggcaggtgggctccagagggctcgagggtcttgggccgccttgtgggcagggctttgtctccttgtagctgttcttctgttcacagcaaaggcaacctcatccctttgagcccagacagtcatgcctttgggatgtgtccacttcagaacagggtctgtgcttgacttacgcataatgaaagctccactgagggaagtccccctgggtctgccccatggtgagcgcgggcctcttaaggagccacctgacacactcctaaaatggacttttcaaggtcccagctaaagcccagtgtgcttctcctcctccccggcagtcctgcaggaaggtagcttttcatcagacaaggaggcctgctctgggctgggggcccccaaccccctcccactcaaccgaacaccagatctcctcccctccctctcaggctcctgtgttacctgaatagcctgtgggtgggtctccctattgttccatagtcagatgcaaacacgaagttgaagtaccattaacttgggggatgagtccgttttcacactgccgataaagacattcccgagactgggtaatttataaagaaaaagaggtttaatggactcacagggccacgtggctggggaggcctcacaatcatggtggaaggcgaaaggcactccttacgtggtggtgtcaagagagaaaatgagccaagcaaaaggggtttccccttataaaaccatcagatctcgtaagacttcttcactaccacgagaacagtatgggggaaaccgtccacatgatccagttatctcctgccgggtccttcccacaacacgtgggaattatgagagctacaattctagatgagatttgggtggggacacagcaaaccatatcacttggtcatccaaggtcacgtggctggaaggagggtggggcagaatcccagcctagattcccctggtttcacagcctgatctcattgtttatttatttatccaacaaatggtgagcacctactgtgtgctgagcagtgttttggaagctggcgataggcacggaatgaaacaaccaaagtccttttcctcaaagagctggtattcttgagcagcagaaaataaatgcaaaggttctttaccacaaggttgagcctggtgagacggaacactcacacaagaagtcaggcagagcagacatcactcacagataggcagcaagaacaggcagaaacctaggacctagcaagccagctgctcatggctcaggaaagctgcccaaggcggaaggcgtttcatctgtgcatgctccaccttggactacagcctagggaccctgaaagcaccctgcctcaggtttcacaccctgggtgacactgcgattgctgagttccagcatcgagggacaccctgatctatgaggaatgaggatatatacagcctgggctgttctggacagctccttctaatctcaggacattggatttgtggcatattctacagtgagccagggcaccagcactgatcccctctcccctcctcccagggaatatttttggttgtctattctcattcattctacttctgaaactgttcagaaccacaggtcaggttctgagaacaccatgagaggaggtgggagagctgtgttagccaaggccatgtgaggctctgtcctcctgcagtaaacaaataagcccatcttattgacacacacacacactcactacaccctctccttagggacacacacacaaagcctttttctttgtaataattacagcaaaaataccacggctggtgctcattggcctggcttgtgtcacatgctcatcccagaaccaatcaatgtggctgtggggatggagccaagcttaggtcacagtccacccccaaagcaagataaaccgtcaaacccacctggaccacacggactgagcatgctgatgggggtggggtgagaagaaaatccaggtgctcctactggaagggaaagggatgatggtaggcaagaggtccagtagccttgacatgtctgtgggttgatgactcccccaaactgttctccagcccaaacccacccttgagtcccggacccacagttccaactctctcctggccacatttgtttgaaagtcctgtgggcacctggaacgcagtgtcttcctccccacagcagctccctctctggtgttgcttgctcgcggcagaaacctgagctcctgcgctgatcccctctcccctcctcccagggaatatttttagttgtccattcccattcattctacatcttaaactgttcagaaccacaggtcacttctcacctgcaccaaagcatgcaacaaaatgttttcctgctgctcttggaacaaagccctgtccagcaaatttcacacaggctatgggctctgagtcctggcatccgggtgatttcagatcctgccgaaacgcccttgctctcagccctctggccacactgacccacgtgggcagcacttaacaggtgtctggcacagatgtctgaacgacatctggaatgtccctttgtctcttgtttctctctttctcttctctaagcttttattagtgttgccctgctgcatggaatattgcctcataactaacctagctaagtcattctcatcctgcaggcttcagtttacccatcgcttcttccaggaagcttctgcccatcttccaggctaggtgtgtgtgctcctcccacaaaccctcatacttcaccttaacatggtgctgagcagatggcgtcatttctgcctaatcccttttcttcttccctcccttcttccttcctttcctccctccgtgctttcttccttccttccctccctccgtgctttcttccttccttcttttccttcctttttgcctatcttctgcctccttgtcccctactgggccataatccccttaagggataagactgtatcttacttacctttataatggggtgccaagaactgcagagtcataggcccttgactaagctcttccaaaggagtgggcttattcccattagatgggagagcatcaaggagaagtgggtccagccctccactgttctctgctgggagtcctggaggatttggggtacgttctggcccaggagacctgagatgtaggaaagcttcgatttagagacagggatatggtgctgaaccttaggggttgcaaaagaagtacttggaaattggctttgtctttaccaacttgaccctggaaagttgtttccagggagccccctgggtttgctgcccaagatcttttcagcagaaagttgggatatgctcaggcttctgacctcagagaacattttttccataaggtctaacatagggtggccagataaaatacaggacaccaagttaaatttgaatttctaataaacaatgaataatttattagcataaatatgtgccaactattgcatgggacatacttatactgttgattgatgattcactgtttaactaacaaacaaacttaactgggcatcctgtatttttatttgctaaatctggtgcatttctatcacgtggagctgagttggatgaacaaactaatgagtttgtattagttatctactgccctgtaacagattaccagaaactcagcagcttaaaacaacacacatgggttattctgcagcctctgtgggccaggaatctgggcacagcgtggctgagctctctgcttcaggccctccccaggctgaaatcaaggtattgactggggctgtggtcttatctgaaatcaaggtgtgggattggaaaggaatcagcttctaagctcttgcaggctgttgccagaatttattcctttatggctggaggactcatggtagtttgctttttcaaagctagtaaagagagtaagattccagagtgagtgctggtggatgggggggagtgtctcctgacatgacgtcatcatgggagtgacacccatcagctttgccgtgttgtggaggtttgcagcaagccacagatcccacccacaatccaggggtggggattatatgagtatggccaccaggagctagggatcctagggacacctcaaagtctgtcccacacagttttgtttcccaccacttcacttttgcccacacagttactcacagcagggatataatttccttttctgagtggacaccagatgttagccttcaaggcccccttaagagtttgggcttctgagccatacttctctgcctcacttgggcaggttttgcctctctgcatctctgttgtcccatctggaagctggagagtaacagtgcccatctcctaagatggttcgttgattgcggctattcaggaagaatgctcagctcagggacagggagcactcagtagacacaagagccccacgagctctgccccaggcagtgcccaggaactgcccagggtcaagccattagtgagtttcatggctgtcattagaccccagtggcaggcaaagccaatgcaaagtggaaacactggtggatgacgtgctgggtgatttttcttaacaacagaaataaacacatttcgaacttggttttatttttggtgtcagtgaaggtgggcagtcaaagtaacttcatgccaagcgcttcctgtgtgccaggccctccctcggcacaaggacacagcagtaaacactgggtgtcgagggctaagtctggcgtggctgctctgtggaattggcctatggaactctgagatgttctaaggtccaggccctgcctcatagatgcccttcattggtctggagtagccattttccaactttggcaagcttgtgaaccaccggcggcatctttctcaaaatcacaggcagattcagcaggtctagggtggggcctgaggttctgcatctcggagcaactccctggtgctgctggtccacgggagttacagtggaattggaggtgttgatatttatcaggctacctcgacagtgatggtcttgaaataaatccataggttctttgatactcctccctttaagaggtaaagctgactccccccactgccaccccttggagtgtgagatggacttcatgctcacttctgaagagtagaatatggtggaagtgacggtgtgtctcttctgagacttaagtcctaaaaggcactgaggcttctatcttgctctctcttggatcacttgctctgggggaaccagatgacatcttgcaagagtgctcaagttgcctacggagaggcaaggaatgaaggcttggaacgtgcccatggcaggacctaaggcctgctgccaacatccagtgaggagctgaggccttcagccaacagccacacagtgggtcccctgggaagcagatcctccatgtggtcaagtcttcaatggccacagccctggctgccatcttgactgcaatgtcaggggagactctgagccagctccatcaaactgagccacttttgatttcctgacccacagatgctgtgagataacaaatgctcattggtttaagctgctaagtcttgggtataactaatacaccaagtgatctgaatgtgcagctgggtaagagaactgttgtaatggaagagacagacagtagtcaagcagttattgaagtcagtggttcttaagcctgagtgtgccttggaatcagctggagggctcgttaaaacacagactccgactgggcgcggtggctcacgcctgtaatcccagcactttgggaggccgaggcaggcagattatgagctcaggagttcaagaccagcctggccaatatggtggaaccccgtctctactaaaaatataaaaaatgagctgggcatggtggtgtgcgcctgtagccccagctactcgggaggctgaggcaggagaatcacttgaacctcggaggtggaggtttcagtgagccgagattgcaccactgcactccagcctgggcgactgagcgagactccatctcaaacaaaaacaacaaaaaacccaccagattcctggggtgaggactgccgctcattaagtagcttcctactgggtcaggtttactgcccacctatcttctctctccctgctcactccccactcacctctaaagcacccccttgtctcaataaatgggggaaccatccctgaaacctttctgatctaaccttggccaacttgatgctccattactggggagatggtcgagtaaatatcaatacctccaagctccagaaaatagtgcagcagtaataaaaaagggtttggtttctatctgtggatctagagaggcgcccatgatttatcttgaagtacagaaagcaagttgcacatttttcaaaatgaaaatagctaaattgttttttacatctccacccgcccccaattataaaagcaatacatgctcatggcaaaaaatagagaaaacagaaaagtataaggagaaagaaagtggaaagaatccagaatgttactgcccagaaacactacttttaacattttgatgcattttcttccagtctcatttctatgcatatttgcacacatgggtgtatatatatatatatatatatatatatatatatgtatatatatatatatttaaatttatattgaagcaaaaatagaatcacactacgaatgctgtttagtagattgctttttttccacttaactatcacagctttccatgctaatgaatatagatttatcatcatctttcatggcaacagagcatttgagtttgaatacagcccacgttatttgagcaatcccctgtggatggacatttaggctgtttctggattttcatgactgtgtaaacagtgctactgaggacaatgctccattgtaccttacccgctgggtacttgcctgatcctcgccttgggatcaattcttgagtgtggaatcgctgcttcaaaggttgtgcacaggtggctgtcttcacaacgattctaagggtgggttctggagccaagggcttgggggtgagtctgggccctgcccctctgtttttacaactgttttcatctggggcacattccttaacctcctggtgcctcagtctcttcctctctaaaatgggaataacaattggatgtcattcctggagctgctgggaggagccagtgagatggaaagtgatcagggctcaggactggcaccagccggctcctgggtgaagccagagagccagttgggaaggtgccttggggaccttggtacctgctggaaagcggagaatacggataatgtaatgttggctaattgtgtgtttttcctgcacaaggcactgttcagaaccctttgctaactcacctcatccttatataagcccctgagttaggcactgtcatctcatttacagacgaagaagatgaaacacagagaggtcagtgtcatggcttggaggaggtggagctgggacccaagcctagtggtgaagctctagagccttcatccctaccacgatgctgggggaaaatgatggagaggaaagaatcgctggggtcagagagacgggattcaaattccggctctgcctcctcacagaaggatgagatgttgagtggctgagtgagcattctgtgaaggaaaggggaggtgggggaggagataggcaataaacagcaaacacgtgtgtgataactgcagaccctgctgctactgggaaggatttggacaagagagtaacaggagggattggcaggtctgcacgatcctccctgagaacctgactgctgagctaagatgaggaagacaaaatgaggagttacctctggagaggagctgggtgtggggaacattctggcttgtgcaagggccctgggggtgggcgagaccttggtgagtttgagaaactggaaggagacccgttctggggccactggaggaaggaggaaagttgttctcttggcaacccacttgattgcaggagaaactgaggcacagagagataagtggtttgccaagtccatggggctggtaagcgtagagtagtgcttttgacgcaggtggtcagacgcctgagcctgggcccttcatgaggcatgtgagtcatgctcactggccttctgaatattcaagagaagctgaaatgctgatttttgtgtgaaatatcctcatgtttaaattttggtaaccacttaaaacataaagtaaaataaatcctgtggagatatgacccaagggccatgacctagtgtgttctgatgtcacctctctgtccctttatctaacaacctctgtgcctttatctaacaatgcacacgatgccagtccctacctcgtaggattgccagagcctgttaagagttatgtgagcgagagctccaggagggggcctgtgtctgtcagcccaaggctgaggttccactcgtgaaacgtggttcctatttcctcactcctcaccatctctggcaatagcctaggcgagttcatgtttctagaatggcttctgcctttgtcccaaaaatgacagagtagcagcaattgatcccttgatgtccctcccagctgctgctttgcagatgcttatgatttgtgcatttaaaacccgactagaaaactctcaggggcacctcccccattacctagcaagcttcatgggagaaatgtgtctccctggcacaaatgcccagagatctgagtaagagatagtattagtccgttttcacactgctgataaacacatacctgagactgggaaatttacgaaagaaagaggttaaatggactcccagtttcacgtggctggggaggcctcacaatcacggtggaaggtgaaaggcaggtctcacacggtggcagacaagataagagagattgtgcagggaaactcccctttataaaaccatcagatctcatgagacttattcactatcacgagaatagcataggaaagatctacccccatgattcaattacctcccaccaggttcctcccacaacacatgggccttgtaaaagctacaattcaagatgagatttgggtggggacacagccaaaccatatcagagattgacaaccattgtttgaaaagtcaaactttggaaaaaacctaagtgcccacttagtgcggactgagtagttgacaacacaagtcacagtggatacccaggagctatccatgagggcagggctagagcagggctgactaatgacggtcctcaggccaagtccggcccacagcctgagttcatacataaagttttattggcacccagtcacacccatgtgtttacacattgtctaagtctgctttcaaggtacaatgacagcgatgaataactgcgatagagaccatattgcccacaaagccgaaaatatttacttttgacccttttcagaaaagttttgctgactcttggacagcatcaataaacaccaaggtggaaggttccccttgaccgactgctatgtgggaaaagaccagaaggggagaggggagggacaggaatgccaatagggtggcttcagttttgtaaacaacgatggaaggcaacaaaatcgtagaaacatgcacacagatgtatcttgtaggtgaacaaacgtctgaaaggatacaccccagtctgctaatcatgctacctctggaatttaataggtaatataccttattgagcatgaactagattccagacactatgctgaaggcacagattctctcaattttacaggactgatccccttttcacaagtgagaaaatgaaggcacagagaggcaaagtcacttgcccaaggtcacacagcttttgagtagcaaagctgggatttgaacccagacctcttcgattccagactacgagggagaaaggcaaacacgtatttgtttttgtctttattgtttgataagcatgaaaaacatcaaacgtgacttgcttagcataattcggatcaaaagccctctcaacacccccctcctatctcttaggggcattcttacaagttggggctcattgtgatttgccagagaggtcacagggcaagaactgctctagataataggtgagaggctgagtgggggcagattctgagccctgggttaggacaggcaccctcttttaatttgaggcctgccaagctcaggacacacattcgcatgggagctgagagctcacctattctgccgagattttccaagacattgcattttatgagtgttattaaatggagttgttgttaatactgattttatggtgctaaaatgattaagcatggcaggcttttaaacaatgaggttcataaaaggtgttaataaccacttaagtaccttaataatatccccacctatcataaactgctcccagttaggcctctttacttttctttgccccaggaatgagtcaggaatccactggaaggctggatggagacttctggaacagaggaggagctgtacccagtttgggaaagtcaaatggaaaggccaggaaatgttcatgtgcattctgaaggacagcccatttcaggctttccagaaagaggaccatggtcatccaggcaccaagaatgtggtgaagggggtgggggcaggggctctggtgcccgacagctccacctgtgactgctcgcagtggcaaaacccagactgcagtgatggcaccgaggcttaacgtctggctgctgcgtgtagacctgactctaccccgctttcgcctagtcagtgtggtcagtttgcctccctctgtgcactgcaccagtgcaaaaggcaactgtgcagccctttgttgaaaagttactgaaaatttcaaggtaataacagtagagccttcaaccaattgtggagcccttctgagcctggggccctgcatgactgtatggattgcacccacgaggccgatccctctctgtgtcctgtttccccttctataaaatggagttagacacatatataacttaaaattttttagtagtcacatttaaaaaagtaaaaagagaccaggcatggtggcttatgcctataatctcagcattttggaaggccaaggtgggagcatcacttgagcccaagggttcgagaccagtctgggcaatatagtgagacctcgtctctacaaaaaattaaaaaattagccaagtgtacaggtgtgtgcttgtagtcccagctatgcaggacactgaggtaggaggatggcttgagcctgggaggcagaggctgcacagtgagctgagattgcgccactgcactccagcctgtctccaaaaaaaaaaaaaaaaaaagaagtaaaaagcgacaggcgaaattcatcttaataatatatttaaactttaaaattatgtttaacataatatatccaaaatattatagttccaacatgtaatcaaataggaaattatcaatgaaatattttacttttctaaaaaaataccaaacttgtgaatcccagcatatattttataatgacagcaacaggtcattttggaatagctggattctgggtgctcaatagctactcgtgtcttgctattgccatgtcagacagcacagatccggatagattgcaccactgtgtttggaactcatttctttctgcgcctcagtttccttagttgccaagggcgcatcattaggtgggtctggcagggccattccagactccctgagacagcgtgcttgatgcatggtaattggcaagtccatcactgtcgccagattggaatcgctgccctgtgcatgccagccgggtgaacctgggcacgttccccctccccagctcaggatgtggaatgcacctgccaaccaccacctcacaggctgctgcggggaccaaaggagatgcgggcagggggagggtgtcgtgcgggcaaaggacagggcatcccgtacgcacaagtcagctgctggtgttcacagggctttgctttcactctgtaatgcctgccccctctggggatgtcttggatctcccacttgaacatggaggcagtgactgtccatcctgacctctcagtgttaagactctgggaagtatcattatctcttcatatttatagcccctagaactgtccctggtatgcagtaggcacttaataatcattaaataactgaatgaatgaatgtacgaataaatgaatacctatgtgaaaggagccattctgctgtcttgtcctttgggaagggcagagatttgaagctgggtggggacttgggggctcctcctacctttgcctgatgggctcatgatctgctgggcgagaccactcaggccaactcttaaagcccagagcccctcgggatctgctctagttctaccaaggggtttcaccctccctggtactgggctctgggtggaccagaaggtctgtgtactcccagaggggccagcagagtggcctgtgaatgacctctcccccacccccaccccagccaggactgtttactcctaatacattagatttccagatgggaatcatttgggcaatcgtgcacttttatatccttgaaaggaaaagagaaaatggcaatgcttccctttctgcccttcccctcaaggtctgccaggatgacatcagacccccaacctcaccagggggcttcctcaccaggggttggcggggaccagaggggcagagctttgagggaggccggagagagggcctgccccttcccctgcttcccaaaaaggaaatcatgaacttggaaatgttggaagcatgtcctctgttaaccttctgcacacctcagtcgtctgcacttcaccgtcatactttctgccatgtctggctgccactcatactatttcttcgcttttttctttaagataagttaacaaagtttttatatagcattaaaaatgttttcattatggaaaattttaaatacatacaaaagtggcctgaataatataatgtaatctaatctaatacaatatactcataatatataatgtatgtattatatataacatgtcatattaaatgttgcaatataagatacaatatttgaaatgatatgtaatatacccatcacttcgcttcaaaaagtgtccactcgtggctgatcttgtttcttccatgtcttcactcgctcctccactgcagattactctgaggcataccccagaaatcatgtctttgcatccacaaatatttcagtatctctctccctctgaaatgttcgactaacttacaaaacttaatttgtcttaaaagtgaactctgtatcactaccctaagaggaaatctgggtaactttccaaaactagatggaaaaataaacaccgcgaaagtaaaatagtgttacccatgtctacgtgagcgtgagcctgctctcttggttcaaaaaaggaatccaagtgctcagggagtgttgaggacaagttggcacccaactgagactttctccttcacagataattaggaagggtgaaagacaattgggaggggaaaactttctctctgtttggttcgttgttacctgatactgaaccataacctcactcctaccggcacgtctgcccggggtgccggccactcctgggtgccacagctgcaagcataggcacccacgggcagggctggctttcagggacgtgctgctgctggtgcaggaggcccgcctgggttcagatcctggcgtagcccttcctgagtatgtgagcttgggcacacagcaaactccccggcctcagtttcctcatcagggaaatgggggcaggagtagtggtaccacgcatggctgttgtgaggctcacgagatattccaagtatagagtttagaacggagcgtgacagagcaaaatctcaatgaatggcagctggtggtggtgttgtttttattgttattattactagcagctaagtagacatcccgatttcttccaaagtgtcccctcaacagtggagctggagttaccttttctccctggtcttcctggtgggggctaagtcttgccctttctcctgccccaggcattttggtttctgaattcctggaactttgcaccgcagcatcggggctctcatgatcccctgagccacttagcctgccagcctgtgagtcacctctgtctactggggaaaaccaagcggcccagaaaaaaaaattccagactcccatgggcgtccccagctgcctgctgccgggatgagcagcgccaccgccacccccatccctgccagacagctgggcaggctgccaggtccgcggctcacacccaggatggcagcagacagctccactgggctgggctctgcgtgtgtgtgcgtgtgtgtgtgcgcgcgcgtgtgtgtgcacgcgtgcgccgcgttctttcccctctgctggcctgggttgtttcgctctgggctgcgcattcatttttagattccggcctcctccctccccgccatctcccgcttctattcttagaaagcaaactggggtgtgcttgggcttcgcagggaagtcagacagaagtttgcccacgtgctccggccgcctgagatatggagttaattaaaaaggaggctttgagcggcaggttcattggccggaaacgcagctggcgggggccagggcgagcctggggtgcccggcccccctgctctaggtggacttggggagctgagtggaggctctgcccagcccagctcccagggcctgagagggcaaggctcttgggagggcctgccctgcctggatgggttggggtggccgtgagtgttggttaaatatgaactcttcaagcatgttgagctgctgagagatttttaattagataaataaattgtaaagggtttggaggagggttgccttcaggaagctgagctggctgaaatgtgctgtctgcggaaggaagccgaccttcctcaatgccagcctggcagtgcaagggcaggaaggcagggagagaggagaggagggagggaggggtgaagggagagagatgggaggaggaggagggtctgggggtactggagtgtctcagtgtcagaggcgttggaaccagagcgactccatcttgagtgagggctggaaaatgaggccgagacctgctgggctgcgttcccagaaagtcaggcattctgagcctctagatgtttatggttaaggaacaaattaataatgtttactaaacagacccagacttgggagtgtccagatatcctgatatctggagaacaaaggcattcctaattttactttaaagataataatatcgattcttgtaaaatacagtaattaagaaaactaatcctttatcacaaaccctcgtagcagagcacatctgcccatatatacaagcattgtacctagggtggacgcgttcctcctcttactttcgggaatgtcctcctctgtctgtggagtagctgtcctttcaccacttgactttcttagtaaatttgcttttactttgcactgtggactcaccctttcttgcgcaactgcgatccaagaaccttcacttggggtctggatggggaccgctttcctgtaacagcagaagagagtgagcagctggaaggaaatgtgcctgaagagagggggagtgcctggttgaaggaaccagcctgaatgggttcaaaatcctggctctgaattttccagttgtgtaaccttggtcacagcacttaacctctctgtgtgcccatttgcttatctgtgaaatgggcacgtttatcataatggtgcccctctttaacttaagacaaagggcttcagcagcatctggcacaaagcagggattatgaagtcacccaaatttatgtctgcagcagggaacagaggaaaaacagaggcaaggaccctatggtgtttagagacaatggttacccctctctgtcttagcccagcaaatcccagcggcattgcacgtaggaaggggaggcagccctatcaggacttaatcttcttggagaagaagcaggtgagaccaagagggttccttctctggggctgatcctccattgactgaaagagatacaacattctctgagagctcagaagccttctcctccaggaaacattccctgacagccagctccgtgcagtggctccctcctctccccttaccatacatcgtactgtaggacagtgtctctctcttatttaaagttgtgtgttttcttacttaagacattttcacaagtattgtgccaacacattctcattataaaaaattaaaaatttcagaagcctgaggaataaaatgaagaggtcttatccctcattctacacccttctcaacagtttgatatgtaactactccttatatgccattttattttgtgcatacatgtgattgtagtatacatattaggtaaaccaagtgagcttcaaaataatgtcttgatatcacttcatgatggtgcttattataacttattgttttatttttaatttttataaagattttcctcaaacctatggtatagacatacagtaaaaaaaaaaactgtgcaaaaggataaaaagtgaaaatgaagtgtcttgacaatgctgccatttctcttccccagaagcaagcctgctgccgatttctcatgcatcctcctggagctggtctgtgcacatacaggcacgtgttgtgtctccaccccccctttctctgtgcacgttagtagcagcacatactatctatgctgcccagctcctagcttattttcacttaactctgcatcttgggagatcattcctcatcaatacaaagcacagcagcctactttttgatggctccctagtattcctttgtacagttgggccataagttatttaacagcctagtgctgggtgtggggatttccaagcacatcaccacatcctttgacattcctcccctggaaacttaaggtctatattctctcccttgagtgtgggtgggcttgtgactgcttcagctaacacagcatggtggaactgagtccatctggttccctggtaggtggcaaatggccagagagcttctgccttgtctgctgggccactctgagctcgccatgctgtaaggaagcccaagccacacagaggatttctgtggaggtgctctgttcctcagtactggcgggggccagcctaccaggttccccgagcacaggcaccagacgtgtgcgtgaagaggcctccagaagagtctttggctgtttgaatcatctcagctgagagcctgaacactgtgaaacagagacaagcttgtgttctgtctgagtttcctatgcataaaattgctagcaaaataaaatgagtgtctgaagcagctgagctttggatactttgttacccagcagtgcatgatcagatcaacgggctttagcgtgtccttgtccactttactaactggcctgccttgtctgtgattctttagaatagggattatctattgattcttttaaaattgaggtgaaattcacataacaaaattagccactttaaagtgagctactcagtagcatttagtgcgtttacaatgttgtgcaaccaccacctctatctagtcccaaagcactgcatccccctaaaaggaaaccgtagtcacgaagaagttgctccccattgtcccctgtgccagcccctggcaacggcaaattgactttctgtctctaccattttgcttgttaggaacactttgtatcaacgggatcttgcattgtgtggtttttttgtgcctggcttctttcacttggcacaattttttttttttttttgagatggagtatcgttctgtcgcccaggttggagtgcagtggcacgatctcagctcactgcaagctctgcctcctgggttcccgccattctcctgcctcagcctctccgagtagctgggactacaggcacccgccaccacacccggctaatttttttttttttgtatttttagtagagacggggtttcactgtggtctcgatctcctgacctcgtgatccgcccgcctcggcctcccaaagtgctgggattacaagcatgagccaccgcccccagcctcttgcacagtgttttgaggttcgtccatattgtaatatctattaatactttttttttttttttttttttttttgagatgaggtctcattctgtcacccaggctggagtgcagtgacctgatcacggctccctatagccccgacctcctgggctcaaatgatcctcccacctcagcttctggagtagctgggaccacaggtgcttgccaccatgccctgctaatttttgtgtttttttgtagagatggggttttaccatgttgctcaggctggtctcaaacttctgggctcaaatgatccacccgcatcagagtgtctcccaaagtgctgggatttacaggcatgagccactgtgtccagctaatactacatttccttttgtggctgtgaataatatttaattatatggatataccatagtttgtttattcattcgctgatgaacatttgggttgtcttcaccttttggttactgtgaataatgctgctatgaacatttatatgcacatatttgagtacttgccttcattcttttgagcctatacccaggagtggaattgctagatcatatagtgattctatatttaactttttgaggaatcactaaactgttttccacagtggccgaaccattttctatttccaccagcaatgtagcgaattccaatttctccatttcctcaccaatacttggtattgtcctctaaaaaaagatcctagctgttctagcgggtgtgaggtggtatctcatggtggttttgatttgcatttccctaatggctaatgatgctgagcatctcttcctgtgcttgttggctgtctgtatatcgactttggagagcgtattgattttgcattcctggtgcctcctgcagggcctggtgcggacccagtgctccagacggctctgctgagtaaagaacaggagaataaacaagttgtgttcccctgccgtggtccacgctgggctccttgtggacatacctgtctcgtgaggcagtgagacccctttgacattccaggctgggtgagtcttacctctgccttgttcccttttatcctgactctatgattgagctagaagcctgctttgcttgctgatgcccaggccacagcccagagctctgccaacactgctgagccccacctgggtcaattgtgattcagtctggggactgttgagaacaagagggaaaatttcctcctcgctcctaggagggtggactggagctgggggcccacttgggctcaacggagcttggggctgcctgagagagaattggtgtgtcccctccctctgtgctgctctcaggcagtgtgggagccctcagctgctgcggggggctgtgccttgagaggtgagagtggggatgaaggagaggaggagcaggagagagcagttctcgggtggtaaatgccagggctctttgccagagggcgggctcaggaatgaagaggaggccccaggagccagatggcttgagctgccgcatctatttttaaagtactttttaattgaggtctagagtaaaattaattaatcgtatttgtacagcttgatgaatttttccatatgtgtacacctgtgtaaccatctcccagaaccccgggagactcctgcaccaccattccctggcaatgacccctcccaagaaaaccaccattctgactgcaatcacccatcactatcagtgagtttagcctgttcttgaatctcatacaaatggaaccatgttctgggcactcttttgtttttagctttttttgttcaatgtcatgtttttgagattcatccacgtcatggcagcactgcctgtgctcgctcctttccctccctccatccctctttccttccttcctccctccctccctccttcctgcctccctccctcctccctccctccttctttccttccttcttctctccctcccttcctgccttcctcccttcatccctttcctccttccttccttccttcttccttctttccttcccttctttcactctgtcacccagggtgagtgcagtggtgtgatctcggctcactgcgacttccacctcccacgttcaagcaattctccagcctcagcctcctgagtagctgggattacaggcgtgtgccaccacacccggctaatttttagtattttcagtagagatggggtgtcaccgtgttggccaggctggtctcaaactcctgacctcagttgatccaccctccttggcctcccaaagtgccgggattacaggtgtgagccactgcgcccagcccttccttcacttcttccttccctcttccttctctccttccttcctgtccttcctcctttttttttccttcttttgctcctcttattgctctacagcagtgggtctcactgggaggattctgccctctggggacaccttacaatgcctggagacatgtttggttgtcataactgggaaggggttgctcctggcaggtagtgggtagaggccagggatgctgccaaacattttatactgcccagccctcccaaaaaagaattctccatccctgaacatccgcagtgccgaggtcatgaagccctactctacagtatctcattgtagggataaactacaatttatttatcccacctgtcgttgatagacatttgggttgtttctagcaattacaaatagtgctgctgcgagcaccctcgtatgtatctctgagtgcctctgtgtgcatttctcgtgggtacgctcctgggagtggaattgttggcaggcatatgtttcacttcagcagatcctgccaagcagttccccaaagtggtcatgccattttaattcccacccttatgtgactgttccagttactctgctttctagtcaactcttggtatcgtctgtctttctaattttagccatgggtgggtgcgctccgtgtatttttcaaatgtgcaagcctcttgtcccagacccctgagtcctcacacagtgttgcggatgtgtgtcattttttggctgcccggagtctgagctcttccctgacgtttggagaatcccctacattataaatcttggtgggaggtagagtttccacattcaatccctatagatcagatactcactttcccagcctcctttgcaactaaattgtggttatttattccccatgacatggctagggggtagatcctaatcttagcttcagctcagcaatgctcagtgaggtgaggttgtctgtttgggattacatactggtaggtggtgggggctggcaatggacctagggctgtctgcctccaaatctggtgctaaacatcaggatcagggcctcggcagtcccactgtacatctctctcttgcttgtttagctgtgggtttcccctttggggctatcaggggactgatctaaatttatgccttcaaacccaatactgcatatgcttactggatgaattagtgaatgttcctggtcttgggatatcttcacaggtgtttggtctctcactctttattacattagaacagattgtaagtccttgaggtcaggccctaagtttgtcttcttcagtgacacagccccagggcttaccacagtgcctggcacagaggagttgctcaaaaaacctttgctaagtgaaggaaataaacagtttagcaacctacatggaaatagaaactctgaacaagaagatttaaatgagaaaaagaaacttattttctgaaataaccagaagtccagagagagggaaggcttcagtcctgctgcgatagaggctctggttccattttagctgcaagtctctcggctctgccctgcttcatgcgttggctttgttctcaagctggcatccctcacatcataagatgctgccagcagcagcaggcgttcttgttcctctctaaggggagaaggagaaaacctctcctccaaccatggaacccaagtccccctttgcttagggctgactatgttaatttatgtcacatgcccatcactgaaacagaaatagttgcccagtgattgctatgagctggtgggctaaactgaaccaacttctggcaagggaaataggattaccacaactggcttaggtagattactgagggactctcccagttactatatctagggaggggctcagcttttccccagttacagcagtggcaggggtcctaggcaccaaaacaaaattaaggttctattgagaaagaagaaagggcaacagttactactaggcagccaagagggtccactgtgttactctttacacgaagtctcttgttaacatggtaagaataaactccacagccatttattcaatcaaccaactgaaaacctatactagttatctagtgctatgtaacaaatttccctaaagcttagtggcttaaaacctcatgtggttgcagtctagatgtgggctgggattgtaatcatttgaggccagaatctgcttgcaagatggcccactcacacggctgtcggcaagaggactcaattccttgccacatggccctctctgcagggctgcttgagtgtcctcacaagatggcggtatcttactcaagtgccagtgatctaagagaaagggctcagaagaagctgaaatgtcttttgtgtgctagttacttctgctatattctgtttgttagaagtaagtcacaaagtccagcccacactcaagggaaggaaatgaagcactatctcttaatgagaggagaatttgtagacgtatttcaaaacttctatgggagccatcatctctcagctctttccatgtgaaagcatagagaacaggcctcctcctacaaattctctactcttggctctggcacccacatcccatcttcatacaagcctggaactttctctgagtcaaggggctttctgccaaaggttatctctgctggattagagagcagacaccttggtgtcctccatggggattttcctggtgacttcctagatgagtttgccaaaaggccagatcctagtagataactcttgcagggaagctcgggagaaattctttactgaagcgcctaccttgtgccaggtaatttgcatgtatttctctcattgatccttgcactgtcccctgagagagggaggacctttgtcattgtcactgaaggaagctgggaaacagatgagatggctcaccccaggtcacctggtatgtgtgatgccaaacccgacttttctgccccacatcaatcctgtgtgggagaggtttctgtttaaggaaatatcttgaatcttgagtcttgttgattcaaaccagcttggttatgttttagacttcaggggccccttgaagagatgggacaggaacaggctgcacaggaaccacttttacatatttagaagttgacaataattaatatttgctaaggatgtttgctgtacttggcaccatgctatgtcttttctgccttgtcttatctcttctgcacatcagtaatattgtaaggtaaggatttctacaatccccttgccaaagatgaagaaaagaagtctcaaagacgttacataatgtgcctaagacctggctgctactgagtagccatgctgggatttctatccagtttgccttgactccagccccagtgctcctgaccactgtcttatgagcagcccagtgaacactgaggctccagcacacagtctactgtcccaaggcagcttccacatccttcagcaagagctttggcttggtgctgattggtggcattagcaggatgtggatggagggaaaatgatggggagaggcctttgcttgtcagcttgtagatgctcaattagctcccaggcacacagaaaaggccccgcttcccaaatcacatctatattcatgatggggccgacaggctgcaggggcaaattgcacattcttccttctgatttttcatttatttcctggtgatatatttcatcttggcaaaaagcaggggttccgagctcacgcagagaggcaggcatgccatagctggactgggcatcagaaactctcctgcactctgtgaacgactaaaggaagcgtagcaagcaatgcccagtgctgtgatttgtctattttgggaggttgcagggcctgaaggtgcttcgaggtcatcttcatgtcttcattctccattgatgctagtgaccaccacatctctacctctccagcccaaacctcttccctgaactctagaccagcactgtccccatagaatctttgtgataatgaaaatgttcattctcctctaatactgcagccactggccacaggtggctactgagcccttgaaatgtggcaagtgcaactgtgggactgaatgtgtcattttatataatattaattcatttaaatgtaaatctaaacagctgcatgtgtctagtggctactatatttgacaccgtcattctaggcctttatttcctttattaccttgcatttgagtgagctccccagaggcaaggatacacgtggaagccatttataagggtagcacttccagaacaaacagggtaggaagggaggcagcaagacagaggcagaaaccaaggcaggtgcagaggtgcaatttcagggcaagcccagccctggcctcatcctctggagtctggagtatcaattatgcctctgaaatagttctgtttggagttgggggagttgggtgttcatggtctcttggccaatcaatggctacaacttgccccagggtaggggaacataaactttcaagcactcctggcttccttcgtgtctggtaggaacagcttcagctgtccatgggaagtcctgtaggagttctacaggtgcatggtgttgggagagtggccagaaacggggtaagaggtcccggggattgagcagatcactggcaatgtcccctccgtcactcccatgtatcccctcacattggaaggcccacagccctgtaaactcagcacgtccaaatgtagactcatctgtattcttttttttattttgttctgtctcactctgccacccagactggagtgcagtggcgcgatctcagctcactgcagcctccttctcctgggttcaagtgattatcctgcctcagcctcccgagtagctgggattacaggtgcacatcaccttgtccagctaatttttgtatttttagtagagacagggtctcaccatgttgaccaggctggcctcgaactcctgacctcaaatgatccacctgcctctgcttcccaaagtgctgggattacaggcatgagccactgcaccagcccctcatctgtattcatttctgattgctggtgtaaccaatcaccacaaagcgagtggtttaaagcaatagagatttctcatcttacagctctgtagaccactggtcttgctgggctaaaatcaagctgtcagcagggctgcattcctttctgggatctccaggggagaatcagtctccttgcctttgccagcttctagaggcccctgcatcccttttctcatggcccctgtttttgtcagagccagtaatgcccagtgggtccttatcacgttgcctttctctgatccttttccttgtttcgtctgtctctgacccagctaagaaaggttcctccacttttaaggccttatatgactaggttgggccacctgcatgggccagaccattcttcatctcaaggcctacacccttcgtcacatctgcaaagtctcttctctcacggaaggcacacagcttctgagaattgaggtgtaggcatctttgaggggcattattctgcctgtcacattctctaagctcccagaacggtgtctactctcaagttctctttcttggtgaatggtcccctccattgccttcatggtgtttaagctagaaaccaattccagtcatcccacaatcaatacacccccaaatcctattaattctacctattgatggtccttaaatcaatgcacttttctagatcctaactgcctctaccctggtcttgcctgaatgtctgtaacatcctcctaactgatcctgccacctttcaatctttcctttaaacagcatccagagggacctatatcaagtgaacatcagggtgtatctgtcaggctgggttacgcagcagtaacaaacaatccccacattgcagtaacttaacacaacaaaggggtgtttctcacacacgctgcctgtcaatgctagtcagcaggggcttctgttccttgcagtaactcaaagacaaagtctgacagaatctccatctgaactcatgtttccaccatcacagcagtgggaagggagagtggcaccagctcttaagattgtgtctggaagtcacatggtacttctgctcccaagtgattggccaaagcaagtcacatgaccatgcctaacatcaaaggaggtgaggaagtaaaacctccccacaagtctagaagatggagaggctgaatatttggttatcaggctaatggttgccatgttgggtatgtccttcaatggtacctggctggctggtaaatggaatcttaattcctccatgtgacccacaattccctctggacctggccctttcttgcctctccagccccacctcatgcaccctgtctggctcctgccaccctggcctcacagtgtagatgcccagccctgcagctcaactatcctctctgcaccaagctccctctggtcctttggccccaggtttcggagccctggactgaacagcatgtcgagccttttgggtcctcatcaactttccttgaagcttctgcctccagccctgggttgggataaacctgccagggaaggtgagtttgagctgcacagggtcagcctgcagagctgagcatgtgattgtgagtcagccgacaaatacttgtgaagcacctacaatttgccagtcactgagatataaaaatgagagagaatccttgtcttcaacttcaagattatacttttttttttttttttaaccacagagacaggttctttctctgtcactcagactggagtgcagtggcgtgatcaccactcactgcagccttgaattcctgagctcaagtgaacctcccacctcaggctcctgagtagctgggatcacaggcacacaccaccatgcccggctaattaaaaaaaaattttttcttttgtagaggtgggtgtattagtccgttcttgcattgctataaagaactacccaagactgggtaatttattttaaaaaaagaagtttaattgactcagttctgcaggttgtacaggaagcatgactggagacgccttaggaatcatggtggaaggtgaaggggaggcaggcacttcttacatgcctggagaaggaggaagagagagcagggggaggtcccacacacttttaaacaagaagatcacatgagagctcactatcatgagaacagcaagggggaaatctgcccccatgatccaatcacctcccaccaggcccctcctccaacatcagggattacaatctgacatgagatttgggtgggggcatagagcaaaaccatatcagtgggggtctttctatgttgccaaggatggtcttgacctcctgggctaaagcatctgcctgcctaggaatcctaaagttctggaattacaggcatgtgccactgcacccagctggagcttatatatgttgttgagagaggctggcaaatgtagtagtgttaaattggaagttttggccaagaggctgagaggatggattctagatggcagagtgagtcagcagagagaccatgaagcacatccccaaaggaggttgccgagaatccaagtggggacccttgaagtcctcgccttcatcaagggcgtgaaagaatctgggatgtgagactaggaagaagctcgttaagaaagggtcttagcaggagctgctgaggctttgggggtgtcttcccatgagcagggtgtgggctgtattccctgcattttaggtcaagaaagaggatgtgtaaggggaccactcaaagcatccaatatatggaccctgctatttggaggtcacagagggcaatgcctgactccttcctccctctggagatttgcaaaggggaaacacctgggcagcagctttgctgcagagagtgaagcggttactgcagagggcatttcagcctgctgctcagggtgtgtgggagcagagaacacgtgtgtgccatgacctggacaatgacctgcatgcaagagccagtgcaggactattcaatgtcctgactgaaaggccacctgaggatggcgtcagtgaacagaccacagaagaaagcagctgaagcactgggctttccatgcattgctgcaggcttcctagggaagaaatctctggctagaatgaagataactttactctctacgagggaacctcagagaagaggcttagcaattggaggtgggtgtctccaaagtgcccaccagggagagtccatgaggctgtgtcaccaggcaagtaaggacttcttgggcctcttacctctccgactgcatccagactccggagggtcaaagccaggtgagagagttgtggggagagcagataagccaacagacagggcagagccaggagggaacctccttccgaatggacagactccccatctgcagcaagcctggagctggcaaggggcaaaccttcatgttaaacgaaggtcaaggttttgaccatgacacagggtctggcgtttggattataggtgggaggactttgtatctggtcatttaagatgaccagaaagtcatggggcctgttttaagttatcatccaggctaaaaaaatagtcccactgaataaatttaaacagaaggtgggagacaaaaataacgactttatgagtacatctcgagctgtgcctgttcactgtgatatttacacaaataaataaaactacagaggtactgagagggccaataaaaatttaaaaggatttatgtgataaagtgatagagaaactgctttagccagggtagaaggggagacccgttgaggaggtgacattggaattgaggcttcaattatgagagggagctggctgtgtgaaggtccagggaagggtgatccaagcagagggaacagtttgtgcaaaaatcctgaggcaggagcaagcttgcagcaggatatggaaagtgagaggaggatgggagaagctgaggtggaaggagaggctggaaaagagcaccaggcggggtcagaaagggggactgtatttcaagtgtgatgagaattcattagacaacttttagcagggaaagaacttctgattcatcctttagaaaggtcagctggctgctattagaatgggcaggagacaagggcaagattggggctgccgggagtgcagcttgtccagaacaggatagagatgatagtgtcttggactatggtggttgcatggaggaggtgagaaacatcaggtttagactataatttggaagcataaagctccatgtgtgatgtgagagggttaaagatgaggattaaggagagttctgtggtttttgacccatgccactgaatggatgttggtgccatttccaagatgagagagagttgggaggaagcagatttatattggggaggggagtgtattagtctgttttcacgctgctgataaagacatacctaagactgggtaatttataaaagaaagaggtttaattcactcacagttccacgtggctggggatacctcataatcatggcagaagacgaaggaagagcaaagggatatcttacatggtggctggcaaagagagaaatgtgagccaagcgaaagtggaaaccccttataaatcagatctcatgagacgtattcactaccacaagaacagtatggggaaaaccgtcctcatgattcagtcatctcccaccaggtccctcctgcaagatgtgggaattatgggagctacaattcaagatgagatttgggtggggacacagccaaaccatatcagggagtcaacaattctcttttcactgagtagtatgcccaggcagtccattactagataatggggaggccaagaattaaggctgtggtgtcaaacaatttgggcttcattgtgtgaccttggccacatcaattaaccactttgagaccagttttctccactacaaaatgggagtaaaaataacagtacctatgttccaggtttgttgtggggagggaaagctctgcaatgggcctggcacacagtaagggcacaagaaatgaaagcagttattggctctttatttgcaagggccatacttatgagtgctgctctgtgttgagtggaaaactgcacttaggacagtttcatttttgtctgccatacttctcctgaaaccttcagatcctggagtcaactggcaagaaaaccagctccagccaggatccctcactaacattcctatggtaggctacaccctggcctggcgttttctttgtgggaaactttcgtggacgcattccatttatttaaaagatgtaggctattcagattttctgtttcctctggtgtcagttttggcaagttatattttaaaaggaatttgtccattacatctatattgttgaataaaagggcataaaattgttcacagtacttgcttataatccatttaaagtttgtgggatatgtaatgatgtccctgctttcctttttactagatcaggcttatcaattttattactctttctacagcactagcttttgatttattgattttctctattatttttcatttttctattccattgatttctgcccttatcttcataacttcccccctcatacttactttggctttaatctgctcttctttttctaatttcttagctcatataaatgatttaggtttttcgtctttttttatgtaattaaagttttcacaggttctagcagttaggaaaaaagaaaataataataattattatttaaagttattaatttcccttcaatcattgctttagctacattggacaaattttgatatgttatatttaatgttcattcagttgaaaataattactaatttcctctgaagtttcttcattgcctgctgttaattttacaattatgggggattttaaaatcatcttgttattgatttctaatttaattccttttgttttttgtcagggaacatactatctatgatttcagtcttttaaaatgtattgagacttgttttatagctcagcatatgatttgtaattgtaaatataccattaaaaatgtgcctttaaaggccgggcacggtggctcaggcctgtaatcccagcactttgggaggccaagctgggcggatcacgaggttgggaaatccagaccatcctggctaacacggtgaaaacccacctctactaaaaatacaaaaaattagccaggcgtggtgtcgggtgcctatagtcccagctacttgggaggctgaggcaggagaatgacatgaacttgggaggcagagtttgcagtgagccgagatcacgccactgcactccagcctgggagacagtgcgagactctgtctcaaaaaaaaataaaaataaaaaaatgtgcctttaaaaagacatttaaaaagaatgtcttctgccattgttgggtatagtgttctacaaatatcaattaagtgaagacgatttttagtgatgctcacactttttatgtgttcaataatttttttttggccttgttgttctatcaatgcccagagaggagtattaataatctccatctatgattgtagtattatttatttctccctttgattttggtactttttgcttcatgtaatttgaggcactgttattaggtacacatacatttatgattgttatgtctttctgattaattggcccttctatcattttacatgaatttgtacaatattaactgtaagtaaaacattaaaagttaaggacatctattctaatctctatagcaaccatataaaaaaatgtagaaaagtatatttcttctgtccatctttatgaacataaagaagtgtccatctttatctctggtaatactttttgtcttgaagtttatctaatgttaatatagccacattcttatgtttactgtttgcatgttgtttttcctatccatttactttcagtctatcgatggtttattgtttctcttgaggacagcatatagtttggtcattcttttttcctataattttgtatggactctatcttttaatttcagtgtttacttcattaatgtttaatgtaattactgatatgattggatttgggtccaccatttaattatttttctgttctgttccaaaacacaaacagaatatctgaatattttttagaattccgttttaaggccaggcttacacttgtaattccagaaactttgggaggctgaggtgagaagatcgcttgagcctaggagtttgagaccagcctggacaacatgataaaactatatttctactaaaatttttttaaaaaaattagccagatttggtggcacacacctgtagtcacagctacttgggaagctgaggtgggaggattgcctgagccctgaaagtcgaggctgcagtgagtcgtaatcatgccactgcaccccagcctggaaaacagtgtgagactcttctaaaaaaaataataataaagagttccatttaaattttcctattgattttttagctaaacttgtctgcatttttaaaatggttgctatagagattagaatagatgtccttaacttttaatgttttacttacagttaatgttgtacaacttcacttaaaatgtggaaaccttgcaattgtgtcagttcatatttctgcatcctttatcttagttgttgtatgtaacatgtacacacacatatatatatttgtgtgtgtatacacacacatatatatatttgtgtgtgtatacacacacacacacacacatattataaaccccacaaggcaaggttatagtttttttctttaaatggttctatggtttttaaagaaattaagaggaataaagaaaaaagaagataattgtcttttgcaggcacccagatcctattttctgaggatctgagtttccatctggtgtcatttcccttcaggctgaagaacttcctttagcatttcttgtagtgcagatctgctggcaacaaagcccacagctttcttttatctaagatatatttgttttgccttcattcttgaaggatattttccctggatgtataattcttggttgacagttttgtttttttttctttcatcactttaaagatgtttttccacaccttctggcctccataatttctgatacaaagtcagccattaatggaatggttgttttcctatatgcaatgtgttatttttctcttgtggctttcaagttgcattgtttaatttggcttcaacagtgtgactaggatgtatcttggtctgggattctttgtgtttattttgcttggtgttaattgagcttcttgcatcggtacatttctctctttcaccaaatttggaaaaattttggccattatttctccaaatattattctgtcccattctttctctcctctgctctaagactccatttacatgtgtgtcagacacttgcctatttaaatgcattcctgaggctctgttcatttttttcttaaatcactattgtccttgtgttttgcatggaataatttctattaatctgcttcaagttcatttagtctttcttcagccttccttctccatttggctcttaaaggtccacccagtgaatttctcatctcagatattacatttttcagttctagaattctatcaggtcctttttttgtttctaattctctgtagagatttcctatgttttcattaaatatacatatatatacacacacacatacatatatttaaactttattagaagttttaatagttggtataaaaatcttggtattccagttttaacatatctagtttatattggggtttgtctcagtcgactttactttctcttgagaatttttttcatttcattttttttaatgtcaagtaatttttggattatattctggtgtggtgaaaagaataatatctcccgcagattcccccctgcaaagatgttgatatggtttggctgtgtcctcacccaaatctcaccttgcattgtaatccccataatccccttgtgtcaagggagggacccagtgggaggtggttgaatcatgggggcagtttcccccatgctattctcatgagagtgagtgagttctcatgagatctgatggttttataagcatctggcatttcccctgctcactctcactccatcctgctgccctgtgaagaaggtgcctgcttctcctttggcttctgtaatgattctaagtttcctgaggcttccccagcaatgtggaactgtgagtcaattaaatctctcctttaaaaattacccagtcttgggcagtctttgtttgtttgtttgtttgtttgtttgtttttgagatggagttttgctcttgttgcccaggctggactgcagtggcgtgatctcggttcactgcaacctctgcctcctgggttcaagcgatcctcctgcctcagcctcttgagtatctgggattacaggcacccgccaccacgcccagctaattttgtatttttagtagagatggggtttctctattttggtcaggctggtctcaaactcccaacctcagataatccgcccactgcagctccccaaagtgctgggattacaggcatgagccaccacgcccggcaagggcagttttttatagctgtgtgagagcagactaatgcagatgtccacatcctaatctacagcacctgtgaatatgtgatcttccatagcaacacagactttctgtatgtgattgggatttggagattaccctgaatgatcctggtgggcccattatagtcacagggtccgctataataaggaaacagtagggtcagaggcagagaaggagatgtgacaatggaaggagaggtaaaagcactgtgaggaaggaaccacaaaccaagaaatgcaggcagcctctagatgctaggaaaggaaaggaaatggattcccctagatcctccagaagaaacacagcccttcagacctacattagtgtgagatgatcaatgtgtgtttttaagccgtgaggtttgtggaaattcattacatcagcaatagcagatgaatacacctggacagaaggaatgctaaattgtgaccattctgggctttttctctgatgagtgctgtttcttgtgttttagcaggcagttagcttggtggaatttgaacttcaaatcctgttgctaggacgacatttcctgtctcagttcacatctttatcttccctaagctgaggtttccgattatgtggccggaatccccctggagtccctgtggcctggtgcctgcactttgtcagccacccttagcctcaggccaaaagccacaaagaaaagcccttgctttgagcagtggcctcctcccctgctctctccactctccaggctttcaggtgtttggatccgggggtacttggagtgttcttttgtttctgaattggttctcagaaagacagagtggaaaagacgacaacttttctagcactgggttccagcctggtttcattacttactcgctgcatgaccttgggcagctgagcttgtgtcagcctcagtttccccatccgtaggtctctacatcagaggatagtgtctgcatcgatgagcaaatgcacgtatttgtaaggtgctggatccaagcttggtctccttgttattttccaagcatctctctgctgctcatggaaggacacccccaaaactaactgctggacagattttccaagccttatcagttcatccaaatggttaactctaagtttctttcctgtccgaaaaataaaactgtaaacagtgatacagagccatgggttgttattcaggatttgcaaactttatttccccaaaccggctttgctacataggctctgctcctaagctattgcccacagcaaacaagaagggatctggaggccgggcatggtggctcacacttgtaatgccagcgccttggtaggctgaggcacaagtttgagacaagcctggccaacatggtgaaaccccatctctactaaaaatacaaaaaaaaaaaaaaaattagctgggcgtggtggtggatgtctgtagtcccaggtattcgggaggctgaggcaggagaattgcttgaacccgggaggcggaggttgcagtgagctgaaatcgtgccactgcactccagcctgggtgacagagcaagactctgtctcaaaaaaaaaaaaaaaagggacctggaatgcttcgtgggggtgtcgcaaggtctcggagcctatggaatctggttctggagctgggcagggcttccactgggctctgcagtcctgggccgggagctggctcatttgtttatgggacatttgcttcctgggagtctacagtgtggtggtccctgccctgggtgctggacacagcagcaaacaaggcagacacagcccgcccttgtagcatggacttctgctcacagcgctgggcacgtgcctgggtgtaaaaccacaactgtgatcagtggaatgggcgggggtgtcctgtgagtgtccgagataggcattgattgggtcgtggaggctagtgggtcacgctgaggtctgatggctgagtagaatttgcctggccgggtgggagggaaaggacaagaggaagcagcaagagcctgtgcacaggccctgttggggtaagggacatggtaagttccagaactgcaggaaggccttggagggctggagctcggaggagggcatgtggggaggataggaagttagggagcgggcggtagggttgctagactcagtaaatgtaaatacaggatgcccagttaaacttgaatttcaggaaaaagtcaaatacttttttagtataagtgtgtctcaagtgctgtatgggacatacttatacatactcacactagaaaagtattcattgttgagcacagcatgctggctcacaccttgaatcccagcactttgggaggatgaggttggagaatctcttgagcccaggagttcaagaccagcctagcaatatagcaagagcccccatctctaaaaaaaaaaattaaaaattagctgggcagagtggcacatgcctgtagtcttagctactcaggaggctgaggtgaggatcacatgagcccaggagttcgggctgcagtaacccgtgatcacaccgctgcactccaagccttggtgacaaagtgagaccctgtctcaaaaatactactactactgggctgggcgtggtggctcacacctgtaatcccagcactttgggagaccaaagctggtggatcacctgaggtcaggagttcgagaccagcctggccaacatggtgaaaccctgtctctactaaaaatacaaaaattagccatgcgtggtggtgtgcacctgtagtcccagctactcgggaagctgaggcacaagaattgcttgagcccgggaggcagaggctgcaatgagccgagattgcaccaccgcactccagcctgggccataagagtgagacccttcctcaaaaaaacaaaacaaaacaaaaactactactactgataataataactcgttgtttatctgaaattctaatttaatggcatcttgttttctatttggtaaccctatgagcagggtcttgcagaacagggcaatgaacttgttctcaaaccaggaacaacggtgggctgtagagctacgctgggagcagcagtatccaggcagcatttggaggttagctgcatgctggggagaacggatgggagcgcgcgaggggcagagaaggactggtgaaggctgctgcagtgcccaggggagcccctgagcatcggaggcttggggaggccccaggtgctgcggggtggagaaatgcactggagtggaatcttgcctgtgtctgctactagaagggaagctgccctttgtcacagggcgatcactcactgggtgccggaggatgtggtactgacgaagcggccaggctgggatccttgcttgatgtcacttgatagctccttgatgtcactaagagccatcatcctgctcacagcccctccccaccccaaaatgagagctgctcagcccagacagacgtcttaccctctgcttgtttttgtgattcaaaaatgagtcatccaccccaggcaagagcaggctgaggaccttttccttggctgggagtttgggggttgggtggctcttccggaggctacagggttcagacagcgtcttgtctgcaagattaattccttccagtgcaagaaacttaaaggggccagatgcggtggctcacacctgtaatcccagcgctttgggagtccaagctgggaggatcacatgagcctaggagttcaagatcagcttgggcaacatagcaagacgccatctctacaaaaataagcaaaattagcttagctgagcatggttgcgtgcacttgtagtcccagctattcaggaggctgaggcaggaggatcacttgagctcaggagttttaggctgcagtgagctgtgcttgtgccactgaccatcagcctggacaacagttctgtaagatgagaacaagaatagtgcctggttcctggggctgttccaggattaaatgagacagagcttatgaaaaatcttgggatatagtagatgctcagttaatgttatttgctttcttccctccctgtcatgtcaacagagaagctggcaaggtgaaagtcaagagcaggaggtcagaaaacatgttcctgtcaaagcccagatggaaaatactctaggctttgcgggccagacagaagccgccacaggcaacatgcaaataacgaaggatggccgtgttcccataaaacttcatttattgactccgctgtttgagtttcaaataatcttcatgtaattttcaaatgtcacatgacattagattttccccccaaccatttagctatgtaaacactagttttagctcatggagtgcacagaaacgggctgtgggctgcacgtggcccttgggctgcagtttgcaacccctgccgagagtgaggttaccatctggctgatctgtgagttttctgactctatgaaggaggcggtgaggttgtcagagtcttgaactagatagaaccaaactcaaagttttatcttttcctaagtttccagaaccaaaaatattccttgtgagccaacctgaactgcaaagatactgatatattttctagaattctttactggaagctccccactgctcctcaaactgtacctgaatcaaatcagtgagtcctgctggagtccctggagctcctggagctggggcttaaaagggtgagaagggcctggggcagacctggtttttagtattgaaagtcccacaaccctgggaccccctcaatccaaggcaaactgggccgattggtcacgggataagtggattaatttctccggaatttcaggcccctggatgctttccttccccatcatctcagggatgtagccctctggggcccctggaggctttccttccccatcatcttgggggtggggggcaccctctgtgtgctcagatccccagtgccctgtccaccatggttagggggactagggcgccctgtcgcttctcagcctttcggctaagatcaagtgtggaaagggggccctgtgggaggctcattttccagcagccacaatccccagggcggtgtgggacctgcatctggtaccgcaggaagcacagctcattgcggtgggggtcaggtgtgatgggatggcctgaaggtcagttgtggtgtgtgggatgggggacctagaagattccttgtcccttagccctgacctgttggctgggagacggagagagggcaggaggcttgagcttggcttgcgagaggccaccagggtgacggactcatcccagtttcatcccagttgggatcgactgtcccactatcaacagtgaatgtcctgcatcctgggagctccctcaatccccagcaaactgggatagttggtcaccttagaggtcaccttagcctctggcaggagacagcagagcctgttcccagtgccctggctgctccagatgtcttggggaccattggccttgcaggtgccgatcgtgaaggcccagaaggcaggcctagtggggtctagcctcccttcttcatagctgcatgacccaggacagtccctctacccactgagcctcagtgttttaatcagtaaagagggtattgtcaagcaagaacctctgagcctgtggtgtgaaagttttagagtacagaatgggtgctttgtggaacaagctctgatgaggatgaagtagaagatggtgcaacaagctgggatgcaccgtgactcagttcttgcttgcttgagaggaaaagaaaagacatgccaaaggaaaagcaagagatctcagtcctggggctggtgatgggtcctgagacgggtgtctgggtggccaggctgggaggtgaggactctggtctgaggagggggctcaggagctgctgcaccccaagccctgctggtcccagtgatttcatgcatgacccaggcacacccagggcctgggttgggacagaggggtgatgctttaagacttgctgtcagcaggtgggtaggctgtgccagggcgggaagaagacatcatgccagcttcctcccccatagctgatgtggaaagaatgaggcccctgggcccccctcaccaaaggcgagaccttcctcagcgaagcctgcccctgagccagacaagtggtagcttccagaccagccctgaacaggagaaatgacaatcgctaaccccagattttactctcttctgtgtatttattccagttagttcatgctcctaactggcgccttccagcagtattcaacatttgatgcgactctttttgttgttaggtgttcctgcaaaagacatattgttgttttgtctgtgcatgtattttactttatgggaccgacagatgtgacatagatctcattgtttcttctcttttctcactcaacatcacatcttaaagcacatccatgttgctgtgtgtacattgggtccattgcatctcagcagtctagggggttcatctcccagagatggctggccggggggtctccaggacccacaccacatgcagatatgtgatgcacattctcagacacatctacctctggaagtgagtatggtttattgggcatagaggcccagaagtcagagctgctagaatgccagaaaatctactagatcctacaactccctgggcagagcccaagaactcctacatccttacatgccctcccaatccctggcaataactgccttttaaattcttgtcagttattgtttcatttgcatatctctgactactaatgaatttaacaactttcatatgtttatcagctctttaggtttccttgtctgtaaatttgcctgttcgtatctttcatccattttcccattggggttcctctcttttttttgtttatgtgccaggttcttgataaaatccacatattactcccctgttgattttagatattataaatatcttttctcaagttatcattgttctgttaattttgtcgaaggtatcttttgtcagctgatgaagcagaaattctcagttttgatgtaattaaatgaatcaggttttggctttatggtttgtgctcttgaaattttgtttcataaaccattcgcaatgtctaggtcacaaagctattatccccattttcttgcacgctaacatttggtttttccttttaagtaaggtctttgatttctatggagtccactttatgtgttgtattaggcaggtcaatgcctatttttctttagctctcaagtccattattccaacatctataaaatgaccccatagatttccggcccctgcatcaccacatcttgagtccctgtcggtacatgggactttctctgccgggctgctttggtctatgtgtctgtccttgtattagtactgcatggtttttatgactgtgtctttgtagtgggtgttatgaggcaagaggcacttggggtaccctagtcctggccctggggaagactcctttttactctccttttgcaaagtgggtttagctcttcttcatggattattattcctccatctaaatgaatgttagtttcatcaaaatcaaacttgatcagtttgattaaagttgtactgaatttataggttcaacatatgaatcagagcaagatacatctgtttattcaagtcatcttttattcaaattaaattttttttctacatagagctcttttgtgctcttggtgaaataaactctcaggaatgttctagttttgattgctcttgcgaaagttatcttccttttaaaaatgtttctaagattatttttaattaaataataattgtgtctatttgtggggtacaaagcaatgttttgatctatgtatacaccgtagaaagattcagtcaagctaatcaatatattcatcatctcaccaacttatcttttttgtagcgagaacatttaaaaatctatcctttcatcaattttgaaatatacagcacataggtattaactctgatcaccatccagtgcaatagatcgctaaaacttactccctgagtctaactgaaactttgggctctttaatcaacactttccattcctccctgtgaatcccaatcgttctgtttctttgagatccactttttttagatttcacatataagtgagatcattacagtatttgtctttctgtgcctggcttatttcacttagcatattcctccagttccatccatgttgttgcaaatgacaaaatttcctttttttttttttttttagaccaggtcttgctctgttgcccagcaggctggagtgcagtggcacaatcttggctcactgctacctccacctcccaggttcaagtgatcctcttgccttagccccgctagtagctgggattacaggcatgcaccaccatggctggctaatttttgtatttttcctagagacagggcttcaccatgttgggcaggctggtctcgaactcctgacctcaggtgatccacctgcctcggcctcccaaagtgctgggattacaggcgtgagtcaccgcgcctggccaatttccttctttttaaaggctgatgagtatttcattgcatatatatatatatatatatatatatatatatataccacattttctttatccattcatgcattgatggacacttagcttgcttccacttcttagctattgcaaataatgctgaaatgaacatgagagtgtagatttctcttcagtgtatatactatttcaattcttctggatatatacacagaggtgggattgctggatcatgtagtaattctatttttagctttttgaggaacctccatgcttctttacaaaatggctgtacaaatttacatttccaccaacattgtacaagtgttctctttgcatcctcactagcacttgttcccatttgtctttttgacactagccattctaacaggtgtgagatggtatctcattgtggttttaatttgcatttccctgatgatatgacatgttgagcattttttcctgtatcagttggccattctatctctgaccaacacggtgaaaccccgtctccactaaaaatacaaaaatgagttgagtgtggtggtacatgcctgtaatcccaggtactcagggggctgaggcaggagaatcacttgaacccaggaggcgcaggttgcggtgagccgaggtcatgccattgcactccatcctgggcaatagagtgagactccatttcaaaaaacaaaacaaaacaaaaatcaagttatttgttttcttgctattgaattgtttgagttccttagatattttgaatatcttatcaaaataagatatttaaacccttatcagatgtatggcttggccatttttcttttaatctgcacattatctcttcactctgttgtgtcctttgctttgcagaaattttttagtttgttgtaatcccatttgtctatttctggttttgttgcctgtgcttttgaagtcctgttcaagaaattattgcccagaacaatgctgtgaagctttcctctatgctttcttctagtagctttatggtttcagtcttatatttagatattttagcaattttgagttgatttttgtctatgttgcgagataagggcccaatttcatagaaagatatctttcctaaagttttattttctagttcaatactagaaagtgtagagcagtgcttttgagttttatcagtcgatcttgcttctagcatttctgctgctttgttatcagttggatattggggtgttgttctgtgcctgacactgtgctggcccctttcagattgcctccgcaccctgagcccaatagataggagtatgtctgggggagctgtctacaccagccagaacacctccagataaaggagaacggaatttgttattgagtgcactcaagctggagtgtctttgtgcaaaaaaaaaccatagatctgattgtcgtttagagaaatgaagaggtgggggtgtctgctcagctagaaagggctggaggcaacttgggtaaactctcacttgagtttaacttgcttaataaatggcccctaccctcaaatcccaaagagatcatcctacatgtgttcccatgctaacatgtagatttccttaaacatttaggtactcagttcacctggagtccacctgtatgcagtttaagcaggtacaccattgtattctttatatagggagatggttttcctaacatcatgtacaaaacttggggtccctgtttgttttccccaccctacctcaggtgagggtttgaggctgagatttttcacctgtgcaggtagcatttccccagactgtcagctccagggcaggaatcacatcttgtttatttacctttggagactggaaagtccatggggcagggcttttgtctgttctgtctaccacatcccactgcattcctcagcacctcccgggcagccctggcaggtgattggtgctttatgaatgcttggtaaatagatgagtgaatgaataaatgagggaacgaagggatgagtggagagtccctgtgcctgacacacagtaagtaccttgtaaatgcttaacatttgcccatttaagctccagtctccccatgtgtgatctgtctctctcctccctccgtgggaccagctgaggttatgggggcaaaggggccttggaacatgcaaagtgcaaactcgtgaccgtgttcttgagttctgggtccattctcgaagccacgtatggcctctcccctgggggtgcctgcagagctcacctgcagatttgttactcgtaagtgtcgtacaccaagagggacaacagcagccccatctttccagtgcttttgcagctgatgtaagcacaagaaactcaggtgaagaaaatggcaaagcactcgagatcagccacaaaacccaagtcagggctttatttgatctgtaatgggaaggaaaaaaaatccccaaacttttgtggtgataggaagaccgaatagtaagaaataaaaccagcactttggcataactcagttgaaaaggacgcttgaacccatactctcatgaagagaccttcacattccaaaggcaaacggctgattcctgcccacgccaagaccacttcctctagaaattttggttgcctgtaggatggaaaaatcatctcctggtttctggcctgacagcagtgagaacatacaaccctatgactgcccccagttgctgagaagtgccggataatgcccctctcctcttctttccagcaagacggcccaactgaggccttcacagcccagtctgggactcaggtccaggcaggagaaaggttcacagggaagcagctgttcatttggcaaaaaagcctcctggaggaaacactgacgttaaattgcaacagggaaacaatgtaggggataggtgtgttctggcaagagaagggctgcaaggaaggagtgtgctgcctctgagggtgcaggagcacagccagctgcacaggggcccagaagacgactgctcttgcgactgtcctgggctgtgagaatgcctgtccccaacaacagaaatcaaatcaggacacttgcagctagtccccacccatctgttcatccctgtatccacctattcgcccatctacccatctaaccacccacccatccacctatcatccatctatccatccagccatccatccacccatccatccatccacccacccatccatctatccagaaatctattcatccacccacccgcccgcttatctatctatccatccatccatccatccatccatccatccaactatttatccatccatccacctattcttctttccatccatccatccacccatccacctattcatccatccatctacctattgatccattcatccacctatccatccatccatccatccgtccatccatccatccatccacctattcatccatccatccacctatccatccatccatccatccatccatccatttatccacccatccatttatccatccatcaatttgcccagacacctgcctgtccattcgtctatctatccacatgcccatccattctttcatccatcttttaacccatctctcacctatccaactgttgatccatacattcatcagtttgtctgtttgtccatccattcatgcatccatccacctaactactgatttatccattcatccactcatctgtttggtttgagcttccctagaaaataatgatgatggtggtggtgaagatggtgatggtgatggtgataatgatagtgatgatatggatgatatattatatgtgatatgtgatagtgctgatatggatggagggaaggttctagggtgaggctgtccaggttgattctggctctcttgtaccagtgaggtgactttgggcagccacttcttttttctgggccttggtttccctaactgtgaattgcagctaatctttgtgactgactcccaggtttgtttgtgaggaaatgatgagccagcacatgtgaagtatggtgtataccttcaataaatgtgtttggataaataaatgagtgcctccagcccctgagtgaagttaaaggataaatcaataattgtggtcacttttggagtagggaatgagagaggagcttaggaattcattcattcatttacgcatttacttacacattcattcaacaagtgctgaggctgactgttgccgggccctgtcttagatattgggggacacagatgagaaagggctgtaccctcatggagcttcccgcctggttagggcaggcaggtgaggtggcgagcagctggtgctcatccagataataactgcattggcaaatataagagaggagcaatgcctggagcagaccggggtgtgggagaaagcatggggggcttcacaaaggaggtggcatctgagtgtatgtgaggtttacctgagaggtgaccaggctgtgtgttggaagcggggctccaaacagaggaaagcttgcagtcaagggggcgctggcgatgagagacatctgagtgacctcagacatatggcatcaccctggcccaggaggttcatcagcccccttcttcggtgttctcagaagtaaatataaaatatttagagcagaaaagtttctcatgcatggtagctaaagtcattttaaaaaataagcagaaagaagttcattgaagaaccttctgggtgtggagagaaaactaacaacacctctgaggtgacataaaacccacaggcttatttaccagcttgaaccgacttgaactttcccaggttccaacagagaggcttggaaggcactccctggagcctccttccccaccctccgctggcccactgggcgcatcctgcccagtgctcctcacaccttccttcctgagctccaccatggcccagcctccatgccttttccttagctgaaatgcacactcccttccccgctccccaaagctgccttgcccaggaagtcctctggattaatcaagacaatttgtctgcacacagcagaaacccagttgctcaactgccaccgcctgcagctagcaggtccctggggtagcgtgaaagactgaagggcacctgtggtgaccagaccctcagggactggaaccggggcggtatggcaagcttgctgtcactctcactgtcttttctgagggccacgttctctcctgctgccgactgacttgtccacagtgcagggaacccagcagccactgctccgtcagccccagtgactctgacgtgtggatgcggatgggtcccactcagtccccacgtccagtcgtggaccaattgctgctgccagggagctggggcctctggctgagctgacttgggtcctcacttcaagggctgtcttgggttgggtttcctccggagcgggttctaggaggaggatttgagtggaagtaagatatgggaaggtgaacccccgttaagcacggctgggatcagaggaggtaaggcaggaagggcaggcaggatggggcgtgccctcagccagtccctcggtggccagctgggtgggctccctccttccagggagcactggagactgtggggaacacagcacacacaccacagagtgatccagcaaggggcaagggagccagggtgctcacccccaccccacctcactgcataagggcagacgaagggtgtcagccagagggcagagagggccctgatggtcagggggacagcgtctctcaaggaggggctgctgacagctggacagaaagccagagggtgcagaaagggccatggccaggggctgagggtgagtctccgagagcctgggctgtcctgggatctttccaggaggagggcaggtggccccaggtgacaggctcctggccaatgaaaagtacccccctcagtcccctgagttcctctgcagggctgagctccagttgcccatgggcatagccccgggggataaggtgccttgactcgcctcctttccttccccgtcacctccttacccccctacccccctactgctgcaccctggtgttgattctcaaatacactactgtacttgcacttgagttttgtctcaggatctgttgctggggtaccccaaccaagacagtgctccctaaatcctgtctgggctcgggatagtactattctgaggggaccccgagatcttgctttgaagagtttgggaataatccctttgtaggaaagaaaggaactaacatttgcccaccacggataagacagccagcaggcctgtcaccttttcttcttatgcaatgacgctgggaagtcagtgctattatcagcccctttttacagatgagaaaacagtggctcagagagagtgggaccttgctcagctcacacagctaccaagtgactagggcaggcaggacttcagcctgggctcagtgactctccagcagttgggataatgatgttttcctcatctccaggactcatctctaagactcatcactggggaaaaccaattccctttgatgacacgctgggctgagctttgcagctcttgcttttgggggcagagtttggggcaggaggaagcgaggatgtttgccgcagaaacagaaagctggggacttggtccagtcactggctcaaagcaagtgagtccagggggaaactgaggtctggagaaggtgccacattctttccttgctccctcttcccctttcttaaatatgtagcccattcattcattcattgatggggcacctgccagcccccaggcactgtgctggggcgtggtgtgagtctgacatcccaccctgatctcatggtcttacgtcatagtgggtgaaacaaacaggctaaactaattacaggttgaggtaagtgctttgcaggaaacaaacaagcaaatgtgtgttttttgcggggagggggccatctttagagagcagagcatgggaaggagatgaggatcaagcagttctgaagacaactgtggaaacactgctcattcagtggcatcagcaagtgcaaaggtcctgaggtggtaaggttctcagcacctacaaggagccaagagaaggtctggctggcagtagtgcacagtcaggtttagggcacgtagaacgggtcatctcggtacccacaatggccccacagagcctctgtctccatctccccactgcagggagccatttttccttgggaacctggttcaaaaatttcccaaaatattgttcacattcaacaaaaggaagccatctggctgccaagcaagaagatggggacagcctgccagttatcaactggacataattaagtcatggctttgtatcaggcccctagggacaaggcacgctttctcctccccattgaaggtttgctaccagcaaagaagagagtgaagtgggtttgcaccctggagagaggaggtaaagccaaatactcctcatcagagaaaagcaaaagaatcaggagcaagagcccatctgcaggccttgagcagatttcctcatatgccggaggatgttgtcagccaccaaggatgggaggtgctctcggggtgggacttgacgctgagaggccttgcactgaccactcctggcctcctagaacagttggctcccaagatctgggaggcccttggcagttgccacagccacaagcttcttgaatgacatggtggtcatgagctaagggctttgtgcatgtggtctcatctcataccccaaagacgtcacagggtaaatgttaggccattttacagatgaggaaactgaggttcagaaaagtcacagggtaaatgctaaagccaaggtgcaagccctgattttgccagcagcagactcaggctctggccttttctgtgattttctcctgtgttttcaaaataaagacaggaggctgtgtagtggctcctgcctgtaatcccagcactttaggagcctgaggcaggaggattgcttgaggacaggagttccagaccagcctgggtaacgtagcgagaccccgtctctacaaaaataaaaaaaaaaattagccaggtatggtggcacgtgcctgtagttccagctaatgggaagcctgaggaacgaggatcacttgagccctggagatcaaggctgcagtgagctatgatcatgccactgtgctccagcctgggtgacagagtcagacctcatttcagaggaaaaaaataatgacaggagccctgggctctgcgtagggcttgatgctgaacccagctgagcccagtgagtgccagccctgttatggtttatttacccatccctgccaacttcctctgtgagtcgctgggagcaattatgctgaaaaataagactggggctcccaagcacaatctgtgtgtgtgtggggcggcggtggtggggggcaggggagcagggggacttcaggaatggcttgatcaaacctccggagactgcagccccaccctccttggactccctttctggttctatcattggtatcctgaagggacactccttggagtctgctttttgatattcagtgtcacatcacatgcagtgacggtgtgatggaatacaggcaaggcttggagtcctgctgcctcagaaccacacctggtttcaaatcccatctgctacttcctggctttatgaccttggggcagtgacgttacctctcctagccttggtttgctcatctataaagtggggcaaacatcagtcccagggatgttgtgagaatgctatgcatgatcttgcagacttgtctgctcagggtctggaaggtggtgagacccaatgaaaggaagctgtcatgactgtgccgaaccccgaccccaccgcaagcaccggctggggttaccgtggctgatcctgacacagacaggcgtgggggactttcctactgaggccaagccctgcaccaggatggcttactgggtttgtgagcacaaaatgtaactgtggggacctatttaaaaaattatggggactttcaaaacagtgacagccaagcattaagccaaaggcagggcccttctgagctcgaggcccttccgggctgtcccccacgacgctggctctaccacacccagctaggaaccggaactgttataaccatgcatcttctttggtgacgtgcatgttccaaatgttttgcccagtttttgcaaactggttgtctgtctttttctcactgatttgttggaattctttcatgtattctgaatgagtcctttgacagcggattttgttgttgttttttaaatgcagactcaaaaaggatgagcaaaagaaagggaaagtgggaaattatgacaacaagattttaggacttttcaagcggaagacgtggctgctcaatgaggtgtagaaaagaaggtgctcccatgcctcttctctctggggtgggggatgaggcatttgaggcttaggaagcggggtcatggtcaattctccacacctcttcctggcccagagcttcagcctggacttcacccacctcagactgcctttcctggctgcggagtcagaatcgtgcctcttcaggaggatgaaggaactcagccgaggactcgcctgtacccttttgtccccagtgggcagcctcagtagcagaattccaggggtgtgtttggaggggaccagtggggtggaaggagctctgacctgggagtctgtgcccaacttccctgcaggctgggtgggctctgtgagccaaggcatgcagctcctccgggcatgtttcctgggagttcagggcaaggtcgctccagccttcctcctcccccaggggagagtgatgggcagattcaggaggagcccagggctacacccaccctctcaagagatgaccctggaaggctgttctgcaggctcctaccccggccccccaggtgaggaaggtggtggggcctgcagggtttgaaagggcccaagtctttaaatgggcccacttcccagagagccctggcctccccctcacccgtgggaggtacaggaggaatgaaaaagctaaaatcatgggcctggaggaatgaatggagaaccagacaaaatgaacccattggccctggagggcaggacagctgcggctttggggcttgagtctgcaaacatctgcccctccccagacacccaggctggggtgaaatgggcctgattgggaggggtgcttcacccaccctgtgaaatcatcaagagtgagaatagtcaccagccacatgcttcccagcaaccattgccaggatgctcctcaagcctgccggggtctgaggggaggggactccaagacccagcagcaggggtgggtgaaggagggggatggagggtggggaaggtggggtggatgacggggatgtgggtggagaggaggggatggagggtgggatgggaggggtggagaggaatagcggggtgggtggagaggaggggatggaggatggatgggaggggtggagagggatggggtgggtggacgcaggagtggaggcgagagtggaggtggggaggtggggtagggtgggacaagatgtgtgtggatggagaacatgtggggtacggcaggctgaggggcagtgacacagcacgcaccaccctttccttcagctaggcctgcccctagtccccccagccccccgagcagaccccaccctcctcagcaacgcacaccaaggcctgtggacccctccagccacctcccagtgcccagctctcctgcctctgccctgctgccctccagccacgctggcctctttctgttccttgaaggccccaggctctatcccagccctggcctttgccccggtggctccctctgcctggaaggccttcagtcccctgtcccatggacactacctagtgcatggcagagccaggctgtggcccaggtcttcggtctgaggaggccgtgggcttcagtatttcaccatgtcgttaccaccgtgcactcaccaacttggacagcttagtggctgcccggggccaccacagctccaagagggaggggctcaggggagttctgcctctccggatcacaggctgtgggcaggaagtgacttaccagggtcccatagttagttcgggaatctatgactcttatccctgccctggaggtggggtctgccctctgtgacttcactcggctccctctcctgttctcaccaactctgaccctggaaggaaggacagaagggagggagggagagatgactgtcccatccatgggcaatcaatgatgtccacaggcacagaattgagtggacccagggaaggaggaagagaaggagaaagtaggggaggaagttggttggggagggcaggaggggcccgagaggcccattttctgaccttggggccactggttgagtcacacccgggcctttgaagattcgaggaaggcacctgtgggaggagtgaccttaagcagataacctgtggggtctctgtttcctcatctgtaaattggggtcacaactgctcacgcctcgcccccagggccaggacacttgggatgagcactcgtgacctttaatgagccagggactgagactctcacttggggagcagaagcaaagccccccggggacggagggctcacgagggtgggatctggacattcccaccctgggctagtgttctgttgtgtggccatcctgacaggtgtgatcatttcgtctttgagcttgtgttttgtaagtaagaccagggacagtgacacatgtgtgttagcagtacaagcgtgaccccgttcccttgcgccccgtctgcatggagggttcatgatgcccatgtacacagaattctgtggattcacaaggtgagtgagacccaagcttgtgtgagatgagcggtttgcatctatgactgccggagaggccacgctttgcttcggacacagagaaaaagcaggggcaccatgcgccatgagcaacagagggaccccatcattccctttctcacatcacttccccatgtcagctgaccacccacgctgaaacaatggcgcatcttagtcccccacctttattagaccatgttggcaaagagggtgcaggaagatgtgtaatttatgctgtgaactggagagataactgtaagaaattcaacctataattgtgagggtattatctccatgactggagcagcaggtgtcagccacacatggggagggacacagcacagccaaaggtaggtggtgttggtagaatgtgcgcatatcgagaagctaagtaaaagtgagcgatggcaaatatttctactgttagttacgggcaagaacacccatgtgcacgcacaggccatgaaacacaaattgtgtaattttgaggattctgcacacaggttaaatgcccttacatttgtatttaatactgaccttgcgtcatataaagatggatgaccaaattcatgctaattatttaaatattttaatttacttaggatgattttgaatagcaaatagaaaacgccccggtaagtgaagagagagactgcagagaaaaggaaaaagctttatagctgagtaggttgaatggcacttttttcctgccttcgaacaagggacctgacgtttttattttgcactgacccccacaaatgatgcagctgtcctgctttcagcaacgagccgggccctggttctctagtctgtttgtgcccaggattctgacctgtttgctgctgggaactgggcatggggcgtagacagcacaggatgtaacatggcaccagcgcttgctgaatgccccagtgccctgcagtgggctttgcatccattacttcacttaatcctcccacgggccctcagagctgggtcctgctattatccccaacttacaaaggaagaaactgaggcttaagaggtgtgaaatgacttctgaccagcagacatcgagctccagctccttctatctgtaaactccatgccttccccagcccccatcaggccatcttgcagctgcgcaaagtcatctccagtgggttctttgattttgcaagatctgcttcctttcaacctttgaatatataagtccctgccatcctcttattaactgtgtccttcctttctcaaagaagtttccacataaaagttcagagggagacaggatggggaggggaaactgaaaaaaggcagtggattctttatgttttattaattgtcagatgtttcttgtttctttgtttcaacctggttcgaatcctgttagccttggctacgcagatcagagcataaagggccaccagcccaggtctgcggcgtcagtttaagtgttaattatgttttcatatctgctataaactcctgtttgggagagcctgggtgttcttaaaataaatggcaatataaaattgaaaacagctagcattcctgaatcaattttcacatcttataactttgaagcataattcatttcttcctctcgagcgcctgtggcgacggggacagcctcacgcctgccgtgtaatttcataaggagcaaatcagttagtaatctgcagcatcttcgtgcctccccacccttggagcccttaaataaatgcaagaaatgccaaatccccccactttattagaccttgttggcgaagagggtgcagggaagacgtgtaatttatgctgtgaactggagagacaactgtaagaaattcaacctataattgtgagggtattatccccatgactggagcagcaggtgtcggccacatggggagggacacagcactgagcttgcacgtgtcagaagtgtgacaccaaggcgatccgtggttgccttagttgccatgttccttagaataggcttttctttaaatatacatatatttaaattgaggtataccatacatagagcacacaagtcttgcaaaacgtgccacttagtgcgtttttgcacatacgcctgcttgtctaacccccactgtgatcaagctatagagttcccctttccccactcccaggctgaccttcccgctaggggaatccctattctcccttctatcaccgtaaattagctcttcttgttcttgtacgttgtatacatggaaccatacagtatgtgacctcgggcactgtcttctcttactcctcatgatgtctctgcagttcatccctgttatgtgcatagtggagcccgctctttttcactgctgtgtagtattccattgcatgactctgccattgtcaattcatctgttgtattgtggatgggtatttcagttctttgtagtgtgtgggctgttaggaattgtgttgctatcagcattagaagagatttagcttccttatattaaaaactggatgccctcctccccgccaccctgtgcacacaatcacacacacacagacacacacacacacacacacgtgcatgagcactcatgtgcactggagtttgtacccacgcattgtcactgttcttctccttcactgttttgactgactcaggagtcacaggagcaaatgccttgtcctcagcgcctggctgggaggctctggtgactttcaggaaacgaagtcatcatttctaagccaccagcttctgattccgcagttcctctgaagtctacgagttcccaggggacgtcgtttcccttcctggttcctggcagtgtgttgcctttattctgagttaactactagacctaattaaacagcaccatctcctcagagtggctgattttcttcctgtctgaatacaaattaaactcccatgccattaacattcaggtcagttgatcggaatcaacctcttttaaaactcaaaggccaaagtgatttcaaagtcagtcacacacctcccatctgcggggaagggcctgacgtggttatcttcgagctgacccagcttgggagctgcctgaggacagaaagtttcttcacaactgagtcaggatgacacagtgcacgggctgcccggcggggtttgcttgggaggcccagggtgatcagagactgtgggcctcatttgtttgctgtttcactccctgcatcatggagatttaaagtcctttctttcatttacccagtcccttcactgagcaaatacgggttcagtgccaggtactgtgctggccctggagctgctgagcatacggcgtgatgttgcattgggccgcacggattgcacacgtgtgggtgagatgcgagacagccagcgtcaagaatgtctcaggctgtaaccctgatggtgcgtggggaaatgcctgtcatgcagtcacgcccttcctctacagtgcacacctgctcctgcaattcttcaagcggtgagcagctgagtgctctgctggtgggtcctcattgagagcctgagctgacggtccagtctctcacccaggtcattccaggtagacacagccccagcatcgagaagggagctctccagggtgtccctacagtgatgatactgccagatggggagggcatggtgcccgccacccctcagcaaggcgggaaggctccagggccctgaccatttcccacggcgtttctgtggatgtgaaaactttcctcgccctcagaagtgggtgtgttaagtgcaaccgttgaccgggggcaacttctgaacccttaggaaacagggatcgtttccttccctggccgtctggttccaagtcagggacgtagtggatattacaatttggggacgaccacaggctgggccctgctgacggccttgcatagttggcttgtttagagtggagcagatgtcagggagtctgactgagagtggattaatgagggcacaaaggctgaaggttcacagtgctcggggggtcgggggtgggaggggtgaggggatagggtggggctgtgtgtgtgcaggctgcaaagccggcccaagactgactcacctgtcatgggagccctggaggggtctgcggggctgtcatcatttggaatcagaaacaagacatcttggctgagttgtgccagtcagggttcaagttccctgtactcagttggcctccttggcctcggtttccccgcctctaaatggaaggatgtagcagctatggtcgtctgcttcccagcagccatgctgccgttctctctcctacagtggcctggcttcgttcagggatccaccgtcgtccaggtggtccaagccctggctccagcctagtcaatcaaggcagtcccatttctccaggggttcatgtgtgcccagctgtgaccagtgagaactgaagagaggcggttctgggacattttctttgttctgaaaagaagatgcacctggagccgtgtccccatcctgttgtgtgtagtcctgtctgcatgtcattcctggggccctggcagccatcttggaaccatgaggggacccttcacagccaagccaatgtgtcaaggtggtggagcagcagggggtttgggaagaacctgattccttcataaccattgaccaaccctaaagctccctcgcccctgggtttcttggcaggccagaaattcaggtcctcttcacgtatgccactttgagctgggctccctgctgctggcagctgaaatcctatgagatagaggaggagagagtgaggagggtggggatggtcactcaggcaggacgctctgccctgatgccctctcattcctcatggccttagagagctcagttccaaacacagcaatgatagcgaaggatttatcaccagtgcgcagaataggggggtagttagtggaggaaaagttagtgagaggagacatctcacgtaggggatttcttgctgaactgaattaacgggatccctgctgaaggcaggccatggtgatgagatgtaaagtgtgggggatgaggagctggatcaggtgccaagggagaggggaatgacttctcagcattctccgttaaagctggcccaagcaggcgagggcagggcccaaacttgaggcctggctgagaagaggcctcagaggatcctgcctgaagtgtggtcaaggacagagtcatcatcggtcctcagcagtcagcacctttcgagggtggctttggctgaaggaaagtgcctcactaatctcacgcctcctttcaggatggctcatgcccagcgactgatcagcgcagggatgtgaaggcctggacctttgccccaactcagaacacgtctaaggggccactccagctccagagccgcctgtggagttggctgaggcccgtgttgaggccatgctgcatctcgattcctccctttccccatcctgcctctgtcccctcccaaaggcgtccagctcgagggcacaccctagtaaagtcgtgcctggggaaagtcaggccagatgagcctacagacccaccatgctgctagaacagtgtggttaggaactccccagtgtttgttttgccaaattgctctggaaaatagaggcgctttgggaggggagagtgggcgtgaaggagagcagggtgtgagaggggaggagagagactgcggtgacccgatgcagctgtccgcagtggtgtgtgaacaggtgtcatcctgttcttcggctcctcgggaacctccagtaaaatctgttttactcacagtgtttactcaccgtggtttctgaggttggaatttttgtgggggaaatggagggacaagatcggagatttgcagcacagggagcatggggtaaacctagaagtcacccatggaggccagttccatcaggcctcattactggacaaccgctgtgtgtgccctccaaggtggatgagtcttatcaccccgtcttacagaggcagaaactggggccagagtgcctggataacatggcagttaggtgcttgggtttttgagtgagatgggcctgggttcgcatctttgccccgtgactcaccagccatgtgaccttggacaagttctttaagcctccacattcatttccctcctccattaaagtgtggcagtgtggatcggtgatgggcagcagggctaggggccaacggccaggagccaagtcctgtcatcactgttcacaggctttgtgactctgggcggtttccttaagctttctttgcccagctctgtcatctatacattaagaataatgatagttgttcagatgagaaaagttatttattggaaaacattagaatagtgcttagcacatgtgaagtgtcacattcatgttaacacttagtattttcatcagtattctaatatttgtttgcggtgggggttagctaagtagctatacttctctctctaactccatctaaaaggtgtacaggaaaagggccaccaagtttcagggtccaggggaaattgcactttactttgacctagaaaaacggttttcctagtttttcaagtacccaaccattgtgattggtttctggaacaccactgtcatggttttggacttgatcttactttctgtttagaggagagcgtttcctatgtctattgcaggcctgtgccacccaggctgggtctcttctctgctgtgtctgctatgaaatggtctggtgttgtccctgggtatgtgggccttcggctacttactgggggaggaaggtcctgttccaatccagccaataaatcaacagacctgaaacagagttgaggggtcaagaaataaatcagcgtgtgtaggagtgcatgtgtgtgggtgagtgtgtgagcgtgtgagggagtgagagtgtgtatgagtgtgtgactgtgtgagcatgtgagtgtatgagcatttgtatttatgtgtgtgtgagagagagcacttgtgtgtgcgagagcatttgtgagtgtgcatgtgtgcaaggacacctgtgtgtgcatgtgtgcgaatgtgggagagtatctgtgagcttgtgccagtgtgtggggggcaggcatgctaaagcagggaaatggggaagaaagaaacacaagtgcagttatttatttttttctttgagacagagttttgctcttgtcccccaggctggagtgcaatggcgcgatctcggctcactgcaactccacctcccaggttcaagtgattctcctgcctcagcctcccgagtagctgggattacaggcatgcgccaccatgcctggccaatttttgtatttttagtagacatgggggtttcaccatgttggccaggctggtctcgaactcctgacctcaggtgatccacccaccttggcatcccgaagtgctgggattacaggtttgagccgctgcatctggccaagtgcagatatttttatcactttatttcagaacggaaacctgtttttagatatgaaaataatgtatgcccactgtaaaataaaaacagataatttaaaaagtcgtaatgaagaaaataaaaattactaggaatctcattaattggaaacagcctctagcataattttaggttatgtctttcctgaattattttatgatagaaaaagttttacataggtaatatattcacctggctcaaaagccagaatacacaaggtacccagtaaagcccgtttgcatccctgtgccccttggccctgcccctcccaccccacagatgacatccttcactagttcttagtgacaaggatctccctctctctctctctcaatagatgtattatatttatcctgtgttttatactcaaaagatatatcatatatatttttctacatcctgctgtttgcaacaatacatattagagatttttccacatcaacacttaagagttccctgtttaaaaaaatagctgggctgggcacaggtccctgctctctgggaagccaaggcaggaatatcatttgaggcaggaatttgagcaacatagtgaaacctcatctctacaaataaaaatgaaaataaaaaattagcacagtgtggtggcgctcacctgtggtcccagctacttgggaggctgaggcaggaggatggcttgagtacaggagtttgatgctgcagtaagctatgatgacaccactgcattccagcctgggcaaagagtgagaccctgtcttttttatatatatattttatatatataaatatattacatatttaaaacatatatatgttatatatattttatatatttttatagattatatataatatacattttatattttttatatattatatatatacacacacatatatattatatatagatgtatggtattccatcttatggctgtactgtgactcatttaaccttcccttttttatgcatgcaaaaatatgccaacacacacagttttaaacaataccaaagtcttacacatacaattttattcactgcttcttcgtgcattaacaatttacagtgaacatttcttgtcactcaatatttgtcgacatcctcatttttaatgatttcacattattccattgtttgaatgagtcttcatttattttaccatttccctactatgggcatttagatagtttctgctttttgctcttacaagtggggccaggaacaaatgtccttattcatttttatgcacttgtctcattttttgcttaagatggattcctggagaccgaattcatcacatcacagggcatgcgtgactctggtgcttttgtgacatgttgccaattgccctccggaaaagctgggccaggcgaccacccaccaagagcagatgtagtggcccctctttgctgggcaccaagcttgtttgcaaatcttccccatgttcgctgattaaatgggtgaacaacagttcaattaatttagggagcatgaccctacatttgtcttctcaagtaaaaaccaagatcctaggaggcactgagaaagaaataggtgggttccaggggggccaggccctgctgtgggactcctgcagcctgtttcccagagtattgaatttgggtcaatgctctgatctgggagagatgagggcaaacgttgaatatcctggaagatgattctctgtgctttctgaatttattctgattgggatcctttggttagagatgggggtattcagttcactgtcttctaataatgacaacattgagcacttatggggtacttcctggggacctagcactagaaccaagattcccacatggattgtctcatggaatacttccaagaactttaggaagatatttgttttttatcatcatccccatttgatgaatgaggaagtggaggatcagagccttaaggtgactttctcaaggtgaccctatggtaagggatggggctgggtttttactccaactttttaatatgaaaattatcaagtatacagaagagttggagggacagcgctgtgaatgcctgtgtgctcaccacctacatttgacagccgtatttgatgtgtgtgtgtgcgtgcgcactctttgaatgtatgttacaggcatcatgacagttcatccctaaatacttcagctgtgcatcctaagaaaaagatcctttatgtcctcatcaccattttctcacctaagaaaactaacaagaactccataatattatctattatttggtctgcaatcaaatttccacattttttccattgctccaaaatccttttagctgttttgctcttgaaccaggatctaacaactttctcacattgcatttagtttttacatctcttgagtcttttacaatctagaatgttctctccttacttttcctccccagaacattgactttttgaagtgaacaaactggctgtgttgcagagggccctcagtgacgccgagtgtggttgcttggaaaagatgatggccaccaaccattctgtggtgaaagcttctgttttctcttggaaattattctgtaggagggtattttggccccttgcaaagaacttatccccccaataccctctcacctaatggcttttggatccattgatgattcttttctggatcggttatttcaatgggagttgcaaatggtgaatttgctaaggtgctcttcctcttgcattgatgagcaggcattctgctccagagaagagcgttctctcaaccagggcatcagcctgtcccttctaggatggctgtgtcaatgggaccagggtgtgcacagaagttcctccatgcaggtccacagcagacataatcaccctcttttgcaccctcctctctctcacagcacactacaaactttcatctccaggctctgaacgagcttccaaaatcatgcccttgcactcctccttggaccaggaggcagccacttaaaggtttttggaaattttgcccaccacctcccaaacaagcaaactgctggaagtgtttgctctgggacaggtcttaagaggtgtgtgccttggcttgggagcagctcgggtctgggcagcctcgggtctttgctgggcaggttgagtgagatacagcatcaccctaggaacaggcatagcctggattttggggactgagggagtgaggtttcaatccctaccctactagctatgttgctttggggagtgacaacccctctgagtctcagcttctctgccctcatcgtggggctcatgatggtaaggcttaccgcagaggccgcatgtgctgttcccatgaaataatgtagaggagagggcctgccactgtgtgccagtcattttcctattaattatctgctttttttttttcttcacaacaaccatgccaggatgattctgtggctgcttgtagtaataggactcttttggtcataagcaacaaaaacccatctcaaactagcttaggcaagaatgggtatttcctcaggtacagtggctcatgtaaccagttaagcctcatgatcaagggccttgagcgctgggactcagtccctctcactgttcttgtttctggacactgtttttctctgtgttggcctcagcctcagtccacctctcccgtcttggtgcctagatggcctctagacgcttcaggattttctctcacttgcattattggtttaggtgaagagaatgtctctgtccttccggctccaacagaaatcccagagaagtctgactggcctgttttgagtgataggcacatcctgaaccaacctctgtggctggagggatccagtttttgattggccgtaatcagagtcagacaccacccttagagttggaagtggggtcagctctattcctcaaaagaaaactggggtgctgttcccagaggagatgggacagatgctaggtagacaaaaataacatgtcccttgcactttgggtctgtggatcgacggggggatgcttgctgggtgagggagcccccacatgcctggccagcgagaagcagaggagcagaatcgtcagtggggcctgggaggaggaccaccgactcacactgaactcccagcctaagccgcgatttatatttagcacgaggaaaactgtcaggctcttaaatatgtatgggattggaagagccaggagggagagaaagtgcagattctgcatgtgccagcgaggaattaattagaaataaaccatataggagaagctgtctaaattctgttctgcttttgatctggctgccaaccgatgacttcgggaattctccaccaagccgtgaccacctgggcctcgcgggcagcccctccagaacaccatacacccgctccgtgtccctgataggtggagaagactggggcctgccttcctctgcctgaccctgttgtcacagctcagcctgggggtgactcactcccatgggggttgcaaatctagatgccatcattgtgcctgtcccttgggaggtgggactgtttacaaagcagggggcgggcaggacctgggtgttggtggagaccatctgcagcccttttttttttttgagatgagtttcactcttgtcgcccaggctggagtgcagtgtcacgatcttgtctcactgcaacctctgcctcccaggttcaagaaattctcctgcctcagcctccttagtagctgggattacaggcatgtgccaccacacctggctaattttttgtatttatagtagagatggggtttcgccatgttgggcaggctgatctcgaactcctgacctcaggtgatctacccacctcagcctctcaaagtgctgggattacaggtgtgagccgccatgcctggcccatctgcacccctttctggagccacccaggtggcctagagtgcagaccctctcccagggacctctgcaccctcagctctcactccacttgctggcattgaccatgatcaatgtccattatcaccagccaggtgtcagacggggcacgggctgggcctctgctgagtccggtgacacctggccctgggctgggcgcacagcaggtgcttttcaggtaccagttggagtcacagctctgaactggaagtgacctggagccagaatgattttttgtttttttttttgagacaggatctcactctgtcacccaggctgggctcagttgatcctcccaccttagcttccacagctgagtagctaggactccagttacacaccaccacacccagctaatttttgtattttttgaaaagatggtgttttgtcatgttgcccaagctggtcttgaactcctgggctcaagcgatctgcccaccttggcctcccaaagtgctgggattacaggcatgagccaccgcgccccacccagaatgatcttttaaaaacaactcgtcatgtcacacccctgcctaagatgctttggggacttctcctgggcctcaggataaagcccctggttcccactatgctatgcaggccctgccacctctgcccccaccaaaccccccaccacctcttccctcctgccccttgtggaccagtgtcattcccactggagtgtttctgaccctcagaagggctgagcttactccccgcccagactgtaccctgcagtttcctcttttggaactctccagccccagatccccatgggttgggttctatttgtgaactggacctcatgtcatttgtcagccttcaaagtatccctgtgttttatgtttttaaagcatttatcatcatgtgacagcatcctctgtaatcaggtgattacctaactgtagtttgtttcttctacaagatttaagtaatgagaggagagagacagagaaagagagagagagagagatcagcactggctggttgtcttggtccccagagcagtacctggcacagaacagtgcttaatgtatgtagtttgaataaaataagtttttttgattgcatttttagaataaattaatgaacatataaagagcattcagaagtcttcatattgtcttttaaatatttctattttttattgcggtaactgtaaattcaaatgccattgtaaaaaataatgcagagagatccttcgtacatttacccgtttcccccagtggtaacattctgtacagccatggtacagtaacacagccaagctgctgacagtgacaaaatccatcaccatccctctgacatccccagtggtccttgctctcatctgtgtatgtggattaatgttcttttattgcctgtgtaggtttgtgtctccactgccacagttaagatgctggacagttccaacaccacaaggagctctgagctgtcctataaccacagccacctccctcccatatactattttgaaaagccatacagtttttgttgcaattaattccatgcagaactccgttaggaagtgccaggtggatgccggtgctggctggttctgcagcggccgcacacctcgctctgcgcacccatcagacaccaccctgggggctccggcccagacctgggatcaggaacagccaggatctcaaaatccactatggaggtggctaggaagcgccaaggggctcagtgtcaagccctagaggccctggtccagtgcttgccttcctgggtgtcagctaggggtcctgggacctgagctagaggcaggacatgagctggcggggcccagcccagcactgagagcctaggggataagctgtgggggtgtctcaggctttgtgcctgagctaaggggtcctgagcccagccctgatggcccagggtgtgagcaaaggaccctgcccagcactggtagtcacattaggtccccccacggtcggatcatgcttgtctcactcccttttcgagcccaagtctcctgccccctgggcagttctgtgagtagccaggtttcctgtcaataaactcctcgttggctgagatcagagtcagtatctgtcctacagctcagagtccccaaccccggcaggcagcgcctcatctccacctctgcagagtgacctctctgcaagcgtccagccagtgccagtgtggtgctccattcagagctcagaaggccctcccagggcgcagtggggcccaggggtgcttttaggcacgagctcaccaccaggcctctttctgctgagccactggggccttctctgccacagagactcactcgaagacttttgctcatgatcttgaattccatttaaggacatcgaggcacaggaaagcagcccacatgctgcagggccaggattaaaccccacacagtccactcctgcagctcagttccccccgacccccaccgacttctggggtcctctgggacagaagctgggcaggtttcttctcagaacagtctccgccagcagcttcatttatgccctcagctgggaccagcccatcttttcccagttcaggccccctaatccctatgacccaactccctccacgttcgccaccagtcaccatttaatttacacccaatcataggggcccatctttgctctggtttcgagaaaactactcaagattctgacttcatcccattttacttttttcccttgtgaagactggaattcagggatatttatcttgctgggcctgcgaaagcttaaataaagtaagctttatctgttggaagctgtcagctgataaaaaagaaaagaattaagcatattcctatttgatgaactatgcagagagggtcagctttctgtcgtttggcttcattgttctctgcagaaacagccacatgcccactttgagaactgcctcgggactccagtctctgacccctaaagcctgtctggacattcagacgtcttgctaacagatggaccgctggtgcggcagcagcatgtgggcggggggaacgtttgccacttcagggacggccatggagggtgtttctcaggacaagagcacatccatgtccctcctttcctgcaagccttcagggattcccatgcggggagcctcattccctcctgggaagcacctttcctccttccaggggagccccctgtggctagatcatctgcgcttccattccaagggcagagtctgacagggtggaccttggagactgatgtctagaggggactgaaaccctgctgggaagtgcaggttccccaagatgtgccccacccaaagtccctctccacaggggcagaaagtcaacttttaaaacctgtgtgggttacaccactcctgcccacttccacagccaccacccagggccaggccaccgcctctcccgcctctcttccctggtcttcccgctctgtcctcacccaactgtgctccaagtaacaggttacagcagatcactcctctgttccaaatcctgccatgttcccatttcacacgcccctaaacctgccccctccccacttttcctcctcctaccccaccccctgtcattgtatccagcactgcagggttcctggcagtgcctcgaacatgccaggcacactgtggcctcagggactttgcactggctattccctctgcctggaatgctcttcccccatatactggcacagctcacaccatccctccttcgtcttccatcaaatgtcaccttctcaatgaattcttccctggccatgctatcttgcagtgctacttgttcccatccacaccccatcctcagtatcttgtccatcttgctttttctttccatagtgctcatggcctttacaaatagtagtttctttatttattatgcttttgttcattgtctgtctccttttgtacaagggcaaaactctggctacttttttctctgttacatccacaaagcctggactagtcggagtttgataaaatatttgttaatgaatgaacagatacagtggctcgttgtggaatgcaggggattctggatagagttgggttcgtacacagggatggctggatgcatgttcatagaataagcaagtttattttgtgaggattttacttacggataaccttcatgttggcaaatgaccaaggtcttttccaataagaactgacaaactcaacaccgattcctaaagctttgcagaaaatctcaaacattcctttttgctgttagaaacagaacacctgactcataccggcttaagcaaaaaggaaatttattagatcatgtgatcccaaaccatcagggagtagttctggcttcaggcaggggtggatccaacattggctttctcactctgttacttggtcctgttcttctccacgttgtcttcattccgaggatccactggtggcaatgtggctgccaacagccccaaacctctatcttccaagtcagaaggaacaactctctacctgttggctccagtacaagtcctaggattcacttggcttgaaccaggaggacatggtcaggcagggtcacctgtcccacctaggaatgagggaagggcagtccccaagggatatccagggtccctttgccagggcaaggtgtggtggatgctgggtggcaacagcaacatacgtcaacctctggaaaattgtttggaaaagtccctccagggagctggccaaaacctgctggtggaacgtgtcccagtggctttgtggagcagcatcagtatcaggtcatcatttcatgtccagatgccactgcaaacactgctccatgctacaggttgcctgggagcccagagccatctttctaaaacttgttcctctctggcctcaaatacctaaagcttgggctctgccttggctcccaagagccaactccagtcagcctcccagctgcatcccccaatatgatgatgcgtggcccagccctgggcgcctgccctgagcccaccagccccaccgtcactgccttcactgcccctttgccacaggagtcctggaatgacctgtcagtcctcctctccatttctccaacttgattgattcttccggatcctctgcccagcctccaggggagtcagccccagcagccaagccaccgcaaggcctcctggtgctatcagtctgtcgctacccctccttcactggcaaggactcacagagtatccctggtgtgtgtggacatctttctctccttccctcccctctgctgtggtccctcccctcgtctgtgtgcctgtcatctagtgacatgatgataatggcaaggacaatagcagcagctatagcagatactggcaggggcccatcctgtccccactgcacccaacctgcagggtgccaatggcttccttcatctcccacctcagggtttctcctggcacaggaggaatattctggacccacatgtagaagcggagagcacaactgttggggtgttaaagcctccccactcctctccccgggaggagccctcagccaatggcagcccggagttgggtgaagatcccttggcccttgctgggtccatgctgaggcatgtcccatgcactttctaagcaggtccctgaccataggctgacccctcatgagcacagcttgtgttgatttgccctccctagagcctcactttcccactcccacactgcctggatcacctcctgaaaaccgcctgcaccaaaatccttgtctcaggctctgcatgtggggaaccccaaactaagaaaacaacaaaccaaatgcttgcccggtgctaagtgccatgttggtgttctctttaagcatttatgcattatatgaacccatgcagaagttattatctcatttataattgagcaggacagaggcttggggagggtaagtgattcagcagccagggtcacactgctgacaggagctggctcaggactcagtgcagtccgcctatccctgatgtctgggctcctgaccactctgcgatgctgagtgatgaatgcatgcacagaagactggcatgtgggccaactccaagacgaaaggagaaatggacccagatgggggaatgagtgtggccacggtcgcaggcacatcagaacacagctaggagaagaggattctctgctcagcagccagcccactccttctggaacagtcattccagacctgtgccattgagagtaactgagagctcctttcatccacactgttgtgcattgtgtaagcatgtgtgtatgtgtgtgaacatgtgtgagtgtgcatgtgtgggtgggtgcctgccctactagggagacacggtgtatacacaacgccccataccaccatggggtttatgctgtgaggagacagacaagggtgcaggcagcaacatggggtaagtgacgcctgcctgaagggtcaggaaaggtccagaagtagctgagccaactcccacaaggcaagctgtcagagtgaggtgttgcagggaccagccaggcaggcctgggctggctggggctgagaggaggtgagggtttgcttttctcagctgtgctctggttgctttgcggctctagctgcatcctttccctctctcagcctcaatgtccccactagtaaagttccaggaggaccagcggtgccttctgacatttgagtggccctggcagtggggtcagtttctggaataggaacagccattggccatcttcccactggccctagcgcagctacactgagtgtctggagtgggccttgtaaacatggggtcaaccctaggatgggcctcaggctggaaccagggatgcggacaggtggaccggcgtctgtcctggtccccccagacccactgctatgggctcacacctggcaacaacctttccaggaccgccttcatgctttgttatgtcgctcaccagccttttcagactcctcctctaacaaggcaatgacaaaatatctgttctcaggaatggaggcccattatgggagacattagcttgtttgaatttggaaatgaggttgcaggggtgacatgcgaatgcagtctctgtctgcagtggggcctggctgggctcctgtctcatgctgggacatggaatgcaaagttgacatttgctctgtggatgtttcagtccccttggctgatgtctggagagcacagggctgtgagtttcctggagcacccagcttgcctgaggccaggaaaagagacttttctggggtctgaggaagtgacaaaaaggactgttccgtgtcctaagcacctcatttctaatccttggaattactccaatcggggagaaaatgtcctcttgcaaaatgctgctggctgcccccacccccaacctgagtgactgccaccagggtggggttgactgctgggtgaattcagtataagtcagggaccaatgcttgcaggctgagaaacctgatggtgccagcttgcttagcttggcccatgtcacgccttaaccaagctcatacatccaaccagaaggccgctggatttgtttaatctatcctggggatgagtgaccagtccatttctattcataggcagaaggtggcttttggagtgcagaatcacagggcgagtttgtcagctgatgtgaatgctccaagcactggctcaagaaaatactaacagcactcccatgcaatatataccagccattaagtctgaaaggtttacatgttttatcttgtttaatcatttcaaccacaggacctttgcatgtgacaaggtcaagccctcctaccacagtcccttatgtttgtagcacttatcacaaccgtacttttgccctggactgtgagggtgaagtctcattaacgctgttcgctgctgtatctcccaggcctggcacagggccctgcgcatagtagatgcttgataaagatgtattgaatgagtggataaagaccctgatgagggaggctctattatgatctgatctttttacagatgagggaaccaagactcagagagctggagtcacaggctccagtggcgcaactgctaagtggcagaacccagatctgtccccggtgggaggagcctctgcacatctctgcatgggtgtctgtgctttgatttcaggatggagcaccagagggcaatctcacggcccgcatttgtctcactacgtcccttacccactgacagttgtagctgccagcagccccgtctcaccgatgacgagatgggagcactgggaggttgcacaatccaccctggggcacaaggtgaagagggaactgcactcagccttctctggctccaaagatgacaggttccctacttggcgctgtctccctgcccgcccctcccgtccccactgtgcctttcatggagcatctaccatgtgtgggaagtgcatgccagccctcactgaactgtcaccaccatggcatgagctttgcatcgtatcccagaagggcctgccctggcttagctcttgtagaacagctcttgtcacacgcaggacagtctccgggcccctcagctgtcaggctgtatggaatccagagccttctctcaggttccgaggaatttcttcccatcctctgtcccatcttctaatgaaaagcttctttaagttgcacagaggcactttgtcctgagacaggcttattgagacatcatattcttttctttgtcaagcctgatgggcttatttcacacacaaaatgaaatctcaaagttgtcattgtagaaagtctgaagagtgggtggggaacggaatgactttctcaaagatgtcaggaaggtgcttagcctgaggtagaaggtggtgtcttgtagtggggaggtgtgggccaaccagccacagccagacagctgtcacaaactgcgccaccttaagcaagtggcttaacatttctgtgcctcagtttccttacctgcgaaatggaataataacagtatctgcctcgtaggattgttatgacatagactaaataagtgaaggcacatacagtgcgtaaatgcaaaagcagctgtgcgtgtcaggcactgtcctgcgctccctaccatcactgccggcagcagcagcagctgagccgtaatgggcacgagcagcatggccatcgcatgatgcatcggttgggagcattcggctgctggtaataaacaccaggagtagctgtggattaatctcggcatggattctcctggaccgcaggtaggctgtccatagctgtggtggcagctccgtgctgtcggcaaggtcctaggtgtttctgcttgttggctcatccatctgagcatggggcttccatcctccagactgcatcgtgctctaatatgactgctggaattccatccgacacctctgcattccacgcaggaggagggagggctggggctgcaccagctgcctctgactcaccggtcctgtgtacgccgggagtgtcccacctcaagccctggcagaacgctgacccttggcccctgcagggtgagctggtaggagggacaggagaagccgtcaatgatgacagggagttggtggattaagtgcctcagcttccttgcctctggggtgggataactctgagaggctcgttctacacatttctcctaagatggccacaggattggcctccagttgctccggttgccatagcctactcattgctatgctcttcgctggtttctccctttgctcacctccctctaccttggaaaaattccatttgcacttgaattcttgacttacagtcagcttctggaagaacccagtgaaagacagggggcaaggcaaaaagaggcacccgcagctgtctgtccaccgcttaaggagcccctccccccagcagttccaaacagcgtgttcctctcactgtgccctagctgcagggcggctgggaaacgcagtcagctggggattctctcactcaggaacaaggagcccgctaagggaaggcagccagcattctctgccactgctaaagaaggaataattacgaaaagtttctatgttcatgtcaggccagatctgacaaggaagtgctaactccctcggccccttgaagcttcctgagaaacctgttccttcatttcagtcaacagacatttagtgagcccctactgagtacttggccctggggtgccatcaagaatgagccatggctcttgatctcatggtgcttatgaggaacaggaaggaggggaggcagccgaggctggaggcagaggaaggggctaatgatgggagatgaagcagggctccacagtccccagacctcccaggccatgtggaccacagaggagtttgagcctcattgtaggagcaaagagagagtgtgctggagatttattttattttattttattttattttattttattttattttattttattttattttattttatttattgtttttgaggtggagtttcattcttgttgcccaggctggagtgcagtggcctgatctcggctcacttcaacctctgcctcccaggttcaagcgattctcctgcctcagcctcctgagtagctgggattataggcgtctgtcaccatgcccagctatttctttgtatttctagtagagacggagtttcatcacgttggccaggctggtctcgaactcctgatctcaggtgatccacctgcctcggcctcccaaagtgctgggattacaggcatgagccactgtgcctggcctatttttttaacttttattttaggttcagtggtacctattttaggtacatgtttgttataaggtaaactcatgtcacgggggtttgctgtgcagattattttgtcacccaggtactaagcccagtacccaatagttattttttctgctcctctccctcctcctaccctccaccctcaagtgggtcccagtatgtgttgttcccctctatgtgtccatgtgttccatcatttagctcccacctatgagtgagaacaagcggtatttggttttctgttcctgcactggtttgctgaggataatggcctccagctcctcccatgttcccacaaaagacatgatctcattcttttttatggctttatagtattccatggtgtatttgtaccacattttctttatccagtctgtcactgataggcatttaggttgattccatgtctgctattgtgaacagtgctacgatgaacatttgcgtgtatgtgtctttatggcagaatgacttgtattcctctgggtgtaatgggatcgctgggcctaatggtagttctatttttagctctttgaggaatcgttacactgctttccacaagggttgaactgatttacactcccatcagcagtgtataagtgttcccttttctccacaacctcaccagcatctgttattttttgattttttaatattatgtgctggagatttgaagcaggggctacattgctgctgcatggagggtaaattcatgtcatggggtttgttgtacagattattttgtcacccaggtacccaatagtacccaatagttattctgttattcttccacccaagctttgccataaatttgatgtctgttcttcaattttagcaggggagtctgtggggcagagggccatgagtggccaggggaagtcagggaggagagctgcagggggcccactttcgagaaaagctggggaagcaggccccagggaactggggctcctgcatgtggtttccctgctgtctgccctgggccagcctctgcgcccctctgagggttgtgggaggatgtgtctaatcccattggttccatttctctggagaagccagattcacacaggcccagaaactccagtcacttcccctcattttacatgagtaaactgaggcagcggctcagtcccactcctgaacataacccagtgcctggcttatggaaagtttgtcggggtactcaacacagactcactgggtgaatgaataagtgaaaatttcagtatctgtgggggaagcagctcagtgcacaagctctggccaccaagtgatggatgaacagtcagcttgaacatttcctgaagatgctgtgtctgtaattctcaaccagggctgaatttttttttctctagtgtgcatttggcaatgtctagagaacttctggttctcacaacttgggggtggtgctactgacatctggcaggtggggaccagagatgctgctagtcatgctccagtgcacaaggcacccctcaacatagaattctccagccccagatggtggtgggttgaggagccctgtgctacatgtaactcctgtacagcactaaccatctgaacaagatcatctcattacacagccgtttacaggaggcctctgttgtgtcctctctactcccatcaaacactcccccttccgtaagccccagtggggcaccaacccgcacccacctcaatcatgagctgtcagtgaggtcaagcctctttccccgctcacatgaccaggcccagccaatgaaagcaccatcctctggccacagagagtggttctgaaggcaagcaacccaaccaggacagcgccacccaactggaaaggcagagttctcctcctggttctgaaaactgccagaggtcacgcaggtgacagtcatcacaggaaaacaggaccaagggtggggcaggcccagtccccagggcatgctttgtgctccaggctgtgtttacccggcttcctcgctgtagccacaaagcgccttggtgcacatgaagagaagcagtagtggttgaacacgcacagtgtcccaggcacccgcctgctcccgcacctcctcagcacatgccctcctcccgtgccctcctgggaaagacaactgtttccacttaaatcagttccaggggttcactcataacctatggataacctgacaccacctgcttaggtaagcagggaatttaacgcctcaagtacctcaaaagcccataaagactccagaccaggcttggtcccacagccagtcaatgtccccaaattcccatctcttcgctctgtcttctgcattgttggtttcactctgaggctccaagatggctcccaggaaagagaatgggtctctgtcccagaattctcagcccgagtcccgaccttcgctttgattggactgcactgggtcacatggccacctgggatccaattgcttctgccaaagagatggactttagtgattggcttacctgaggccacatgctcctaacaagagcgggaggtaaagttgacttcttgagaagtcaacctgcatcccccactgggaaaggcgagagatggaatgatgcaggaaactgtagggaaaaggcagcagccaaaaaggaggcagctgggagggtgaagtgacttgctttgagcgctgtttcttatcattgcatatctgactgcccagacacattaaagatttcttcttaacagccagaatcccttgctgcacccaaagtggtgacaagagaatcagctgggggtctcgtgagtgtcataggaaggactgggggcattgtggtcaagatgataacagtatgtgctgccactccctgtgttagactcatgaaggactttcatattgttgagctcagtaacttctcaaacagccccctatgtttgagtaggttggggagtgagggaaaggggtgattgttattatcccaggtttggagacgaggaaattgaggctccaggggtctatgcctcgtgttcagggctctatactaggaaggggtagaactgggacttgaacccaggctgatgtgactcaaaactccctcgaaggaattggcccatgtgattgtggaggctggcaagtccaaaacctgcagggtgagctagcaggctggagacccagcacagctgatgctccagttcaaatccaaaaatggtttgccaaagaaccaggaaaagctgatgttctttatgaagttcgaaggtagtctgcgggagaattctctcttgcttgtcggaagcccatctttttgttttattcaggctttcaactgattggatgaggcccagacacactatggagggcaatctgttttactcaaagtccactcatttaaatgttaatcttatccaaaacaccctcacagaaacacccagaataatgttagaccaaatatctgggcactgcggcccagccaaattgacacaaaattgactttcacagtccacttcttgctccaaaagccaagactcttggatgctgactattactacttttctttgctagttttatcattctttgaaatgattaattttaactatacacaattcatatgtataaattgtaccattaattgcaaaagtagtgcatgaccatgttcaatttgtaaagagtaaaatattacaggcaagtgccctttgttcattgtaccaaatccccaaacttttccttgggggggtgacatagggcatctgtcaaggaaggctaggttattctgtaatcacaacaacaacatacaacccagatctccaggcttcagagctacatgtacatctgggttgggaaggggctctgctcattggcacaaggttggcagggagctgccaacttggagatggttgattgttatgccacagcaaaaagaactctgaggaattgcacatcagcaattaaatgcccagcagtggccctgtgatacttttgctcataactcgttggccagaaatagtgacatgttcccactgaacttcaaggtgctccagaagtgcagttggtcagaaatattcagaaaccagatggtgacctccacacactgggatcagtttgtgtgttccttttgaggcctctttgtatgcgtttgcatacataggtagaaaatatgtaatgtattatgttataaagaccattctgcaactctttttctttccctaagaagtatcttagagaattttccatgtcaggatgtgtaccttggcttcatccttttaaaggatgcaaatgatgtcatgatttggacacttgatagtttattttgccagtcctctatggaggtgttgtcagtttttgctgctatgaggaatcctaaaatagatgttctaacctgtgctctttagtgcacattcctcagaaatgctgggtgctggcttgcatattaaaaatttgatactaaaaaattatcctctaaaatgactatactaatatatactcccactggcggtaaatggcaactccccacttgttccctaactagtaatatgagtggacttcaaaaagttcatggaagaatgaaattaaaagataaaaatgaaaaacataaactttataagctccagcaaggtcaaaacactcttgtaagcagtggtaccagctatttagtccatcccttaagaactgagggtcctgggaatttagccatgtcaatagtctttttttacattattaactgaagaaaaaaagggccctttaaagattttttaagagtagcaaacactttttttacaaagtcagaaggagccagatcaggactttaaggtcaatgcctaatgatttctcatcagaacgctctcaaaattgccattgtttgacaagaggagtgaacaggagtattgtcatggtggagaatgattctctgctgaaggtttcctgggcattcttctgctgaagttttggctaactttctcaaagcactctaataataagctgatgttattattctttggccttatagaaagtcaacagcaaaatatcttgagcatccccaaaaaactgttgccatgacctcctgatggtccacttttgctttgactggaccattaccacctcttggtagccattgctctgattgtgctttgtcttcagaattgtacaagtaaaaccgcgtttcatctcctgttaataattctttggaaaaaacggtttcaggaacttgatccccctacttgtttaaaatttccattgaaagctctgctcttgtctgcagctgatctggttgtaagggtttcggcactcagtgagtgaaaagtttgttcacctttaatttttcagttagaattgtgtaaattgaaccagttgagatgtctgtggtgttggctagcatttctgctgttaatcgttggtcctcatcaattacggcatgaacaagctgaatttttttctcacaaattgatgtggacggtctgcttctgtgagcttcatgttcaacagcatcttgccctttctgaaaatgggttattcatttgtaaactgctactttctttggggcactgtccccacaaacctttcataaaccatcaatgatttcactattcttccacccaattttgccataaatttgatgtttgttcttcaattttagcagaattcacattgctctgatatgggctcttttcaaactgctttcttatcctacttagtgcctcaaagtagattctgttcagacataacaagttagtacaagttaattttggtgcaaaaattttgagatctatgcatagtttttgataatatacattttccatgtaatttttgaagacctcctttcttataatatgtttacatttatttttaatctgatgggagatcccttcttaatttaaaaaaattttaataactgttacctctaaaaaattaaacaatggagatgtatagagaaaaaagcccaagcctcttatctgcttttttcagtttctgatttcatgctcctctctggaggaaccactgttaaaagtttgaagtgtttcttacagatttctcgctgcatttacataacataaattaataattatatattgatttttaaatgcataagtgtgattgctgtattatatattgtccggagcttgctttgctaccccctgtgctcccctcaatttttaacatctcttatcatgttggtttttataaaattaagttactggctgcttgggttctcttttactgttctgtcttctgacacaagctttttatctacagatgagacatggagaaagggaggggaagttgatgacagggctgcctgtttttcctcttccccttcctggagatgagtttcatgggtggagtgaccagcatccagacatctctctgggcggaggcaggatgaggaaaaggcaggctggctgcaaagtctccgatgagggagaagggaggttgggggctggcatgactgagggctggggatgtaacgcagacaggaatcattccaaactccggtggggagaacatctcctgtggcaaaatcctgcaaaatgctattaaggataaattttttattgctctgtcccgtaggcaacttgggaaaatagcatagtctcagcataaatgagttcccgttttattttatttttaaatgacgctttcagcactggttctgactctggaggaatgaagcagtcacggctgcggccacagtgacagagagagggtgggagcagatgcaatcaagtgaggcaggagaccgacccttaagtaggacagggggaccccaggggctggcccagctctctccacaccattcccctcccacacttctctccccagccgagggttatgggagggaaagggagcagttatctgtgtgtctctggccaaagaaaatttaaatgaaccaaatgacaagacataatgcagaaaccatgcgtggtgccattttctcttaaaatgtctagacttattgacttatttacaattatttctgtggtgcttcttatgtgtctcttactgctttaagagcttttggagtgctaatttatttatttgttacagcaatgttattgcagaaggttcgatcaccttgcctgccacaaagatggtggggtggtggaatggggcatgcacccagccacaggacatctggtagaagggcatgtgtgccagtccacatgtccttccaggctgtgcatggccccacttttgctcagctgccttccccagcagtggatcaccccgtccctgaggtcgtcaagcgccggctgcctctgctgtcttctcagccccacacctcagcctccactcagatgagggtagggcttccgcacagcccacatcacacgctcgtgtgtgatcacggctgctctggtgcacgaatttacgtggaggggaactttagatgctctggtggccatcctggggccatcccaaggggcagcacagcacaccctaagagtgtggggagagaagtcaacaccctacaggcagaatatcaagcaaagcaagataggagacaagaaggaaccagtagacaggtcactccatctccttgctgggcaggccagtccaggatgtggtggctctgcacagcatctcacaggacatcctgcctcactgagcagccagctgggtttccttgaccagctgtggccagctgggacatgtgccccttgtctgctctccctccttctttgcttcacgtccctcacccctcaggctggcttcccttgggctgcactcctggatgaagtagtgtatagctttgcctccagctctacttttcagggaattgctgctgaaccaggtagaaggaggcttcatcagagcagctacgatttctacagccctgccctcccccagtcccatgcagggcaatttgcttggattcactctctgcatcccatgggaggcctgggaggctggtgctatgtgaagacaaaatgcagcgtgcctgaggccaccaggtgagcagcctgcccagggtcaccaggaaccaggaactaggaggaaacaggatgtgattctgggcagtttggatccagaatatctgctctcaagtgtcatgatggggtcagaggctgatggtcacctgcccatggctattctccacgtgtgactccaggagcttcacataaagtatcccagttagttctctggaaaaccctgaggagggagatcccatgattcctgttttacagatgaagaacatttgactctgagaggtttgagtatttattcattcagcacacatctgccggatgcctctcctgtgcgaggtgctggtccagatgctggggctgcaagcgtgggcaagaggctcatggcctgttgaccatgtgcatgtgcatgtgtgtgtacatggacatgcgtgttcatgtgcatgtgtgtgtaagaacatacaaacacatacagagtaatgacagattacaatccatcccaccaaggcttcctttgtttagggcggccaggaaagtcctcccgaggaggtgccagctcggtgatgtcagaaagctcttggggaccagcctgcaagggtaggggtcgggaagagcatcttaggcagaggcagagggaacagtgccttcagagaccttggtgtaggaaacgtctcaaaaggctggaggaaaggggggcttggaatttactccaagggtgatgggaaggggaaggggaaagggaatagccattcgctgttaagaagatccctagtgtgggagggagtgggtctgtagggatggattgcagagggcaggggtggaagggggagcctgggaaggagctgctgcagcatgggggggcctccttctgtgtgatctgcacagcccattgtctcccccagaccctggttgaggagcctggggctgggaggctgctctgtgccaaccaaagcacccagaagcccaggggtccagacaccttggtgtttgcaggacaacggagagaatggggttggagaaggagaagcctgggggtaggctctataaaggcttggtactcactgcgagcattcctcagtgctcttggggtacaatcaagaacatccagattccttagcaggctacacgcggcccccaccttgagatctgtcaacaccctccacctcatcctgactctcttccttctgcagttccacagttgtcatctggaagaactcacgggtcctccagaggccgtctttcatcccggggtcttagcacctgctgtcccctctgcctggtcccacccttctgccaccaccttccaacacgacaggcctccccctacccaaagttctctccctagtcttatcacaagcgtttgctctggcaagcctccagacccccggatcaggttaggtgcccctccttaagcctccccagccctctttatttgcatgtttatttgcatatttgccccattcacctgggagctcgcgggggcagggactgtgtctcttttgttcatggctgtagtatccccagcaccttgtgcagagcttggcacattgtaggtgctcaattaaaattgggtgagcaaatgaatgctgaatgaatacgagggactatccatggggaggaaggagtaggtttattccttgtggcctccaacaggcagaaccagtttcagtggctgaaaagtacagcgaggctaatttttattccctgtaggaaaaagcctctccaataactgacattttgggatggtgcagaactttcatcccactgtggaaatttttaagtgggtgctgggtgggtcacttgcccatcttcccactacacaatgaacatctgggaggcagggatggcatctttttcttcttgtgcccagagcctgtgcagttcatgcacactgcagagttgcttagtctgtgtgccctgaaagcaggaatgtggttgtctccacccccgaaatcttctaaacccacactttcctgtccggcagccgcttatcacaaatggctacagttgggtcctaatggagctgaaatgggtctgaaatacagctgggtctgaatggagctgtacggccagtgtaaaatacacaatggatgttgaagacaatataaaaaagaaatgaaaatgttgataatttgcttacatgttgaaatgataatcttttgaatatattgggttaaattacatatattattaaaattaatttcacctgtttcttagttcttattttgtttttttaaggcgattattaggtaatttaaaatatggctagcattgtatttctatcatagagggctggtctaggatagtgcttcccacctttcttgggtttactgtatgctcttaaatcctgtcagtcctgcactgcgtaacaacgtttcagctgatgacagctgcatgtgacggtggttccgtaagatcatagcagagtggatatagaaacctggtacatggcacttgctactggcattgcagatcaagtaagggaaatgattgatattcgtaatagtgcttgggcatttggttttccatgtggaaaaaaaaaaacagttacatgttgtttaatggcagggatctgttctgagaaatgtgtccttgggtgattccaaccttgtggcaatatcatagagttactgacgcagccctagatggtacagcctactatacacctaggctattttgtgtagcctatggctcctaggctatgaacctgtacagtacgtgactgtactgaataagtcattataacacaagggtgagtacttgtctatctaggcatacctcaatatagacaaggtacagtaaaaaaaagaagagatataaaagataaaatatggtccacctgtatagtgcacttcccatgaacagagcttgcaggactggagactggaagttgctctgggtgagtcagtgagtgaggctgaggtgagtgaatgtgaaggcccaggacatgaaggtgcactgctctagacttgatgaatgaacgtcgtacacttaggctacactaaatttactttttttttgttttttttttttgagacagagtttcactctttttgcccaggctaaagtgcagtggtgcaatcttggctcactgcaacctccacctcctgggttcaagtgattctcctgcctcagcctcccaagtatctaggattacaggcaggtgccaccatgcccagctaatttttgtattcctagtagagacagggttttgctgtgttggctaggctggtcttgaactgctgagctcaggtgatacacctgccttggcctcccaaagtgctgggattgcaagtgtgagccaccagtgcccggcctaaatttacttttaacattcttgtttcttcaataataaattaaccttagcttactgtaacttttttacgttataaacttttgaatttttataaactttttgactccgttttaataacacttagcttgaaacacacattatagagctgtaacaaatattttctttctttatacccttattccataagcttttttctattttaaaatttacttatttactgttaacttttttgttaaaaatgaagacacagaaacactaggttaggccttacacagggtcaggattgtcaataccactgtcttccacctccatgtctgtctcactagaaggtcttctggggcaataacgcccattgagctgtcatctcctatgaaaacaatgccttcttctggatacctgctgaaggacctgcctgagcctcttcttgggaggtgacactctttccagaaataagtccatgatggttttcttagtttatgtctttttttcatcataaatctgctcataagcaggtaatgtgtcatgaatattcgtccctattactgaaaaccttttgacgctgggatctatgttttcagattttgtaaggaaattttgaagactgtgaaagctgctgctaaacccttcactgtgaattttcttgaggatcctcttctttttctttctctctctctcttttttttttttttttttgaaacagtgttttattctgttgcccaggctggagtacagtggtgcaatcatggctcactgcaaccttgacctcccaggctcaagtgatcctcccgccttagcctcctgagtagtcagggatacagtttccaccacgcccaggtgatcttttaattttttttgttttgtagagacaaggtctcactatgctgtccagtttggtctcaactcctgtgctcaagcagtcctcctacctcggcctcccaaagtgttggtattgcaggcgtaagccactgcacctgcctcttcttttccttctttcttttgcctcttcttcagctgtgcattcttgttctagtttcaacaactcctcattagccaatttctcagggatcatctctaggacaggaatttttcaacttcattgtaatcttatgggaccaccaccatatatgcagtccattgttaaccaaaacattactaagcagcacaggaccatatataaagaaaaatatacacagcatctaggtttgggtaagtacgctctatgatgttcgcataacagaatcacctaatgatgcatttctcagaacgtatccctagcgttaagtggcacatgactgtgtactggagtttttagccttttatcggaaaggatcaaaagaccataagcacctttaactatgacaaacttaggattgtcctcagtgtacttcctgggctggtacagtcgagtcacacagcgtgtctgagggcctcctcagtccctgggctccccctggttggtggcatgtgggtggctactaagtgggactctttacttcaaaggccttgctgtcttctgtatattgaatatgccatctgtctttgcaaagaaagtttcttcttgattcgtatacccagcctaaggcacctgacatgtgctgaggcattcagctgactcagcccaaagttctttcacgcagagatcagtgtaagacttgtgtatcctcattcgatgtatatatatatatttttttttctgggaattcatattaaaagtgcacatccattacattaacccagcaatcccatttgtacaaatccatcttaaaaggatgaaagcgtggcacttaatccaagttcctccgttgaggactaggattctcttacagcttgctggttctgcctcccagatgttgaaggccagcctccgtctgatggttagacctgggccaagtacagttgttaaatatctggactcacatctgcacacacagatggcgattgcagcgttgtctgtggtcaaaacaacaaaacgagaaacaacgtaagtgtgattgataaggaacatgttggtccacctgtattgaggaatatttgttgctacgaaaaatcataagttagagccacacgaatagatctggagagatgccactgtgggtttttggtggaaagcagcaagttttgagtagtgcttaccgtatgattacactttgtgaggtctgcaggtctgttcgtaggagcagaaaacaggcatgaataggggtgtgcgagactggtagtgggatgggctatatccactgtttgtgcattttttggttatttgacttatttatttttggctatttgacatattttggttatttgacaagcgtgtgatgcatttatatttttaaaataggagaatatgagaaaacatggatgttcttcatcagttggtttggtggccccttgtgaaagaggagcgtgccccagcatgcagtggaaaagacagagggccctgtcctagacccctgcttcagaaaatcaagctccactcaggcggccactgtttcttcctaccctggaaataaacatctttttcatgccaaagaacgtgcgtggcctctccaggcaggagactgattctcttcttgcaccgaagctagctcctctcagtcttgtctgggatcctgccaagacatggaaccagaaaaagaaaagacaagaacagccaggtcgaggttcggtgctggttagattcatggcccaggtggaggtgcagcgctggttagatttacgtcagtttcagttcatggcgagggctcctctctggtccgcttttcatttgggtcagttgagttcctcctaatttctgtttcattgttcagctcccaaagaattccagaaatgagaatgccttccctggccagcagcctcctggctctgtgtgtctgaaccaataaggcatgtttcctcttgctcctcacttctgatgttttatcaggctccataatgtgtttctcatgctgtctgccctggagtttacgccctgaaccatgttcaggtgaggaaattcctcgagaagataaatcaccgcagacatagcaaagactacatcttggtagaactcttgggttgaatggggccgtatgtgttcccaagtgcagacctccaaggtcagtcaagcccaaacaagaaagctcaaatcgcagaggcctctggagtagatgctttgttgctgaagaagcctgctgagcatctggggactcaatggttgtatgcccgggacacatcttcattaggaagcctgggattcactgctccatgcacgagctaggttggccagcttggttgcaacagaaaactcagcttgaactggctttaataacgaagggagttggagcctgctgtaactggaaagtgaaaagcgtatgtggtttcagataaggctggatttagcagctccagccatctggccagaaagctccccctcacctctccattctgcttccattgtgttgatttcatcctccgatcgcctcctctcttggccccaagatgtcagcaaatgccccttgtcaactgtctgcttccagatctcaaattggtagaaaagagaaacgtcactccccagagagctcaaatcaaggtcccagaactgagtcccgctgacaagggccgtgggtccactctggaagccgtgcctgtgtctaggacgggtgggctgcatagctgggttggtcagggcatccccaaagagtgcttgggcctcactcaactagggtggccaggtttagcaaataaaagtgcagggtccccggttaaacttcagatttttgataaataatgaagaactttttagcatgagagtttttagtatttcccaactataaatgaaaaatatggccaggagtggtggctcacgcctgtaatcccagcactttgggaggtcgaggcgggcagatcacctgaggtcaggagtttgagaccagcctggccaacatggtgaaaccccatttctactaaaaatacaaaaaattagccaggtgtggtggcgggtgcctgtactcccagctacttgggaggctgaggcaggagaattgcttgaacccgggaggcagaggttgcagtgagcggagattgcaccactgcactccagcctgggtgacatactgagactccatctcaaaaaaaaaaaaaaaagaaagaaaaatataaaaatatttacatttatgtatattgagaatgaactgccaggcacccaggcaggtcctctgctccgtcagttcagctatatgtaaagatagctctcagtctaaatatatttaaattaattgttgtttatttaaattcaaatttaactggatgttctatattttgtctgggaaatatatgcacatgggaaatttgaggccctgacaggctgggggatggggaaggggatggagagtgggcagccagggatgtccgctgtggacaatgaagaagtgtctgcctgagctcagatttggttgggcttataacagcaggaagacagacaacaggatgtttttccaagcagggcctctaccaggctgtaactttattcatttattgattgattgcttttattgggcttatcatacaaaattcagggacaaaagaatgtatcatttagaaagcaaaaacatcctgcctccttagttcccacaaattaattgccattaaaagtttgtaacatgctttccaggaagttcttcatacagaccatcgagtcctaggtattctagaaatggttagttttacaatgaagtatcacactgtccattcttttttgcaatttcctatttgcctgacaacatacctcccaccaacttaaaagttggttttggggtgtaccaaaaaaacttctgttgtttttcatgggttgtgaagaccgagttaatcaagaatgaaaggttgtagttacaatctgttgagaaaataggaatgactggtgtcttcctctctccctccttcttttcctactttctccctagaagtggttttactcaaggaatacagacctgcccctctgaagcaagcaagagcatggcattggaatataaaggtggttcatgaaattcaccccacccagctctgcctggagtctttttgacttggggctgagtcttggccttggccttataagcattcggagcttgagcaagtttttaaccttgtcggctttggcctccttgtctggacagtggggatgttaatgtcaactcccagagctggggtgcaatgacatgggattggtgtgaaaatgacggtgagaacgggtgacatgtcagttccctctcagttgcccacggttcaacagagtcgccaagtgcccgccacccaccagggacagtgctgggggctgaggcccctctatagcccctgtttgggctgggtagtgggcagggttatgttactcagattcatggctacgtcctgagaaacccccaacccaaaggaaactgacagtgctcctgtagggcagcacaggggccgctggacagccccaggcatgggaactgcctgaaagatgaaggcgcagcatccaggcaggacctctgctccgtcagttcagcaggagagaactgagatccagagaagagaaggggtgggtgcagctctgggcttccggaggaggcagtccttgcaggttcctggtgaaagtggtcctgaggggcagggcagggcagggcagggcagggcaggtccgcagctgctattttcacaaattcctctccagtgtggccccggctcccaagccttcagactgtagattcacaatttacatgaggttttccttacttgaaaaaattttttaaaattacattttaagctagacaagtaatatatattccttgtaaaaagtcaagaggtacatataagccaaaagtagaataaattgcttatatattgcttatataagttgcttataattccagtacctaaatactgttactattttggggcatattcttttaaatctttaagaatttcatgtaagaaatagttactgagaggctgccagtgtcaggctctgggctggatgctggggccagtgtcagatgaggctgttgagcctcctgcactcagggtctcacagccatggatccagtacccccatcccgtccctcctccacccaggccaacgttctgcacacagtaagtgtgatgcttaatgttatgtgtcaacttgactgggccacaggatacccaggtatttggttaagcgttctggatgtttctgtgagagcgtttctgggtaagtctaacatttgaatagaccgtgtagagccggctaccttccctaatgtgggtaggcttcgtccaatgacctgaaagttgaatggagcaaaaatgttgaccctttcccaaataagagcaaattcctcccactgtcaccagcttttgcctgcctggagactcaaactgaaacggtggctcttcctgggttgtgagcctgccagcctttgacaggaaccaccctctcggctctcctgggtctctggcttaccaacagcagctctcaggatgaagcctccacaatcatgtgaaccagccctttcggatgaatctcttttgtgtacacatcctgtcagttctgtttctctgaagaaccctgtctgtgtctgatacagatgcaggtctctgctccctcccctcttcctttaacaagcacttattgtgcacctgctgtatcaggctgatggctcaatgagtgcttgttaagggaagagagtagggggcagaggccctcccatccaaaggcactgcagtgcacccctgctacctgtcactccgctggctgtagttgcggactggccctgctgcaatgagaagaaccacccagctgacccgcagactcgggatcccagccacagccaactgcacatggctggggcctggtacaggtggggccaggggagggcctggctcacacctgctgccccatagaccctgctagtgaggagcagcgctgggattgcattcggcttctgactaactgagctcaagggcctctgtcttagtcagggttctgcagagaaacagaatgggatttgtgtatttacttgtctggctcacatgacgatggaggtgaagtctcacaaccggccatctgcacgctggagacccagggaagttggtggcgcagttggaaggcctgagagctgaagagctgatggtgtcgattccagccgcggtccgagggccagaggaccaggagcattgagggcagaaaacaacatcttgccccagtggtcaggcagagagggcggattcctccttcctctctgccttctgttccattcagaccctcgctgggcaggatgaggcccacccaccctggggagtgccatctgtgtgaccctgcccaccaacttaaatgcgactctcacctggaaaccctgacagacaccctatttccacgtagggttccttatgaggcactgggggttcagatgtaaacatgtttgagggacacagttcaacccataacaggaagggacagatgccttaaatggctgcaggaaagatggcatgagagttgtggagggcacaaaaccctgtgcctgcacacagtaggtgctcactccagacaagcgagtgtggttcaaaatcacactgggctggaagagggagggatgccctattctgagtgtgggttttggtaccaggcaactgtgggtttgaacccaagctgtgtgaccctgggcagcttccccaacctttctcagctggttttctcgcctgtgaatctaacctaacctgtaagacggcagtgagggcgagatctgtatcgggtgaaagctcgtcgaaggcactgaattcttaaaccatcctaggcctcagtttccacaactgtcaaagaaggatggggattttgaagtctggacagatgctgcaagagcccagaaggagatcaatgatgaggagctctgaacccagaagccatggcagtctgggctgcactgactaagctgtgtactccctagggagggcggatggccggctcccaccaccccagcccagctgaggagcagctggccttgcagtgggctccttggatccatgtcacttttgtgggtcacctggacagcccggcacaggggcctttggtgtgggagttcctcagagcatgaattttcacctcctgtatacactggggttttctcagccggtgagacggtgggagccccagggttcccctcggccccaaagattctcaacctgattcaggggagaaggctggcacccctgggggtgcaagatggccccagtcctgcccaggggctaattccctgtgggagacctgaaaaggctctgggacaacagtgccacttaattttagcttgacgattggcctctggacgagatgtcagcacagggaactatttatagcaattcctgcccctctatggttgctctgcctgtgtgggttggattgaattttgcttaatggccagatggattcagacaagcagatttttagtccaaactatgtcaaatggccatttagacgactttccctcttcaatcattcattgcattgttcaatgaatctttctagggcaatgacaatgtgccaggcagtgtctgggcaccgtggagacaggagcaaaagaagtaggccagccccattcccacacagctcaccctcgatgggattgagcaattgaccactggcaaagcacctactgtgtgccaggcagtattttaggcagtcttccctgggagacagctgggaacaggacagaccagtccctgtccttgcataactctcagtctattcagccattggaattaataaactctgacacagcacctactatgtgcagtggtgatggtagagggagcgcggggctcagccgtgctcaagctgctcctggcctcactcactgtgggaggcaagggaaaggccaccaggtggtgaagcaggaaggaggctggggtgagcccagggacgctggctctaccgctgggtgttctgtgatgaaggtcaagcccttggcttcgctggcctcagtttccacacctgtaatacattttggggtgctgtgtgtctgcagctcccaaaagatggtgaatgggggtgccttcaagtgatgaaagaacaaatcatttctgtgttgttatctttttttttctttctatctcttttttttttttttttttttttgtgagctagagtctcgctctgtcaccaggtcgctcaggctggagtgcagtggctggtcttggctcactgcaacctccgcctcccaggttcaagtgattcttctacctcagcctcccgagtagctgggattacaggtgcatgccaccacacccggctaattttttgtacttttagtagagacagggtttcaccatgtaggccaggctggtctcaaactcctgacctcaagtggtccactcactttggcctcccaaagtgctgagattacaggcatgagccactgagccaggcctgttatcatttgttttaatatgaaacaggaaaaaaatacacccctggcatttcaagtccagtcaacagagtctccttgaaaggggtatatttaagttaaagagagaggggagtggtgattgaactgagaatatgaggtaaataacagtgccaaggactatggcacaatctccaagcaggcggtcagtggggttggatgtggggctgtagaggatttggaagattcagctggatgtgcggggtctctggctgcaggtccccagtgcccccctgtgactcctattggtgaggagggctgggacatcctgttcagagtaggtcttgggatgaatccactccccagcgtgcatgtcccttggagcagctctgtgcccagcaggggctattgtgactggcagggcctttgcaggcaatttgggaggtcctttgcaggtggctggggactgggtgtccccgagcttcctaaggaggcctgtccttctgttcctaaggaggcctgtttctgggcggtgccctcctgcttgcctctctacctatccatgtggtcttcaggggtccctgcaggtaccagccctgagcttctcccttcaggttgggggtccctgaggagggcgctgggccccagctgttgagggagaagctagggtgtctcccctctcccaccagcctacagagaggagggagcctgtcaggaaggagccctcgctgggagaaggggccctcgctgggaaaaggggtcctcacggggagaaggagccctcgtggggggaagaagccctcggtgggagaatggaccctcactgggagaaggagccctcgctgggagaaggagtcctcgctgggagaaggggccctcgctgggagaaggagcccttgctgggaaaaggggccctcatggggagaaggagccctcgtggggagaaggagccctcacgggtagaaggagccctcggtgggagaatggaccctcactgggagaaggggccctcgctgggagaaggagccctcgtggggagaaggagccctcacgggtagaaggagccctcggtgggagaaggagccctcggtgggagaatggaccctcactgggagaaggggccctcgctgggagaaggagccctcgctgggagaaggggccctcacggggagaaggagcccttgtggggagaaggagccctcactgggagaaggagccctcgctgggagaagggaccctcactgggagaaggaacccttgctgggaaaaggggccctcacggggagaaggagccctcgtggggagaaggagccctcgctgggagaagggaccctcactgggagaaggagccctcactgggagaaggagccctcacggggagaaggggccctcatggggagaaggagcccttgctgggagaagggaccctcactgggagaaggagccctcgctgggagaagggaacctcactgggagaaggagcccttgctgggaaaaggggccctcatggggagaaggagccctcgtggggagaaggagccctcggtgggagaagcagcccttggtgggagaagggacccaccaaatcgcacacatgccattgttgctccttccgtgtgcccttctgcagcttgtgaggtcttcaggacagagttccaccacttcagccccacccagtggagtctgtccgcccctctgagccccctccgagcttttctcctacccccagttccattgccttcctgagcctgaagtcgggaaagtcgcttggggttgttgggggctcagtttccccatctgtaaaatgggctcgcagccacttctccatctcaaagtgctgtcgtgaggattggcacctgcctctgtgagtgcccagcaaattgttgtgctttttctgaaatggcattagtttcctaaggctgccggaaccaaagcccacagctgtgtgctccacagcaaacattgattcttcacacttctggaggctggaagtctgaattcgaggagcttgcagggccgtactccctctggaggctctgctggctgcaggccgcccaccacatgtcccggcctgcaatcacctcgtcccagcctcagcctctgtcctcacatggcttcttccctctgtttctcctcttcttctaaggacaccagtcagattggattagggcctgtcctgattcattatgacctcatcttcacttgattacatctggaatgactctatctccaagtaacatcaccttctgaggtccaggtggattaattttggggcagacacaattcaccccaggacagtggcaattttgtttacttgcttcagcgagccttgtgaggtgggtattatcacacccatttatcagatgtgaaaactgaggctgagggactgagggccccaagagctgctaagtgacaaattcaggacttgtacccagagcattttagaacccagtgaggtcagggagtgcacaggtcctcaaattcacactgcctctccagctgtacagtccacaaaattggtggtaaacagaaacactgaagaagaagaagaaaaaaacagaaaactcaaatgggctctgtgtgtttataaccaaagactttctccagagagtgtggtataaaattttaatattttaggcaggcaggcaatacttcttgtctagacattgagaaatgttcagacacagaattatttccaagctccagccaacacagtggcgtcccccgcattcccccagatgaggggtgtcatttactttgcatttgtgagcagacaccacaggggcctgattgctgctgggaggcccggacctccgcgggtcgcagcgttgccgtggaccccagagatgccagcggccgcgctgtcttttcccagacaattgagctgcttacaaatcaataacaacaaggttgacggggatgggggcttgatcacactgaggtgcacacagctgtcagaacgcggtgactgtgcacatgagatcgtaaactccctaattagctttcgaggagaaggcgtgagggctgagggtccagctggcgcttcctgctttgctttctgtctctcttgtctgccgtctgggaaggtgagcaagcaggccctccgttgctcactgtaattggtgatgaagacggggactggtgctctagtgccggatgtcttctgtgctgtgtgcccttcagccggttcctgtccctctctgtgcctcagattcctcattgatacaatgagctcaggctcccgggggcttgcagagttggcaaaactggtctcttgacccctaacagttcccatgggacccaggctggagaccagcagaggcaaggctgggagacagcagagggcgagggcagtcttccaggctcagaaaggctgctcttggctcttcccatccaaggagagtcccgcgtggccagcaccaaggatctctcccacttggaggtgaggaaactgaggcttagagccagggctaggactctagtcttcctgccctcgggggcctctcctggctgcatctttgttctccagcatttccggagcaccggctgggtcccaggctgggtgctgcaggtcctggtctagcatggtaaaaccaacgggacttccaagcccgagcagggcaggtgggaccctgcaccttccctgactaaacctccctactcatctcgttgtcattaagattgaagaccatttattgagcagctactgtatgccaggcacctttgaacactcaagctgctacggtggatggtggagagaagggtgggttagtggaggggaaggtgtcaggaaccccgatgtccttggaacagagcagcccccaccctcccagggtggctgtggactctttccttctctcttgagccctcgcatgcagtggtgtctggtagaaacatgtactctccacccgtcaaagcagcagtagcataaatagcatcaggaatgttggagatctcaggctttgaggcccagagttgagttgctactttacatgatttaattaccgaaaaaaactgtgttacttcccttccaacataaccttgcagcgtctcagaaatgcttgccgagcaagcctgcagaaaaatttggaggctggcgggtgctccccctgcttgttaagcactcactgtgtgctgggctctgtgcttaggactgtctgtgcaccgtctgcttacagccttacaacaatcctttcaacgagccatacctttgtcccattctacagagaaaaggaatgagaactggcaaagctggtgtggtcaacagcaggatggcctctcaaagatgcccatgtcctaagcctcagaatctgtgctacgttatgttacaggcccaagggggactaaggctgcagatggaactcaggtcgcttatcggtcaaccctgagatgggagattatctgggattagcagattggcccagtggaaacacaagggccctcaaacctttgtggttttggaaacacaaagtagaagaggaggcaggagaatcggcacagagcgatatgatgtgagagacgcccggccaggctctgaatgtggaggaagggccacagggcaaggagcgtgggggcctctaccagtggggaacataagatgtgaattctcctctggagtgtccagaaggaacacagtctgctcgacatcttgattttagagacccattgcggatttctagactggcctctaggtctgcaagatcataagcacgttttgttttcagccagtaagcgtgtggtcatgtggttccgcagctgtgggaagcccacacagcggacttctcgtctacgtccgtgatgggggctgcatccatgcccaacctcagccactgattcagggatggccacgtggacaaggctgggaaatacaaagcaatccttgggctccgctggaaccaacaggggcggaacgctgtctttccatcagggctgctgaggggatgcagcaggtgttaccctggagctgctggggggtctatttgcgaccacgaggtgcatgttcatctgaatgacagaactgggtgagagggaagcgggatggtgacgttgtgtgagattctggatagaccatgcctgaagccaactggcctttatgttccaaaaacctgtaactgtccctctgcactcaggctgctctgagctgtgcttctcatcacctgcacctgatacattcctggctgtcccaggatccaagcctggcttttgaaagcctgtaggattcgaacgtggccttgctggtccttatgtacactctccctttcagagtttcagagcgagaggacagaaagtcagacatcagggaagcttagactcataattgtggaaagggacacttggagaagactttcagtctctttttttgagacagggtctcatactcactcaggttgagtgcagtcgtacagctcaaacgacctccccagctcaaacgaccttccctcctcagcctcccgaggagctgggaccacagatgtgtgccactacatctggctaatttttgtattttttgtatagacaggatttcgctacattgcccaggctggtctcgagctcctgggctcaagcaatcttcctgcctcagcctccccaagtgctggggttacaggtgtgagccaccgcacctggctttgttttacactttttacactgaggtgcagagaggggaggtaacttgcccaaggtcacccagctggtaagagacagttggaattaaaacctgcttctcagcctgctccgcccctcttggccctcagcagtcccacaagaaagggcttcgggtctataatttctggtgggttttttgctgacagaactcaggagagacctgagcttgcccggccttgtttttgccacactcataatgcggcccacattttcttgcggtggagctttcagaagctggcgttctgactgggccgctctccagcccaggactcgtctggaagccgtttgtggggtctgccatctggtgagctgcggctgtgcggttaatatttcccagactaggctgcttcctggtcccccagactctccggccccctcaaagtgcggcagagagaggaatgtgctacaggcgggtcccccgtccacgcatgtctctctcttggttacctgccacgcttccaggagacagatggctccacttaacatgtggcttggagccaggaggtcctggaccccaggccggcgataccaaacaccagagtgtcagatgcaggactggctcccatccacccagtcccagctgggaacacgtgctttgtttctcccttcctcccagttctctcgtctttgtgtttttcagccttgccaccattttcaaagaccctttttatacacaccctcacccagggtttattccagaggactgttcttctcttactgccagcttgtctgagcgaccccctatcactcatgatgaactggatgtttacttagcacctaccaagtgccagggagttgcagacggtattcgctctgtagcaacctgagataggtacgattctgaccccatttcagtgccagggaaggcacccagagctgtggagtgacgatctgaggcccacacagctgggaagagataaaagcaggggccatgatgacatggatcttattatgcccattttactgttgagggaactgaagcccagcacagccatgtgacttgctcagagacacacagcagatgagccgccaagatgaggccagcctctttctgacttccttctggtttcctttctcccacagggaccccactgagccatgagctctagaatctgtacggtgggcagacgaccttgaccacgggacatgttccttctggatcctgccccaggtcaaggtggttggaaaccctccctggcctgaaagccgttaaagctagtgaatgagcaggagggtggtgggagatgaggtcaaagagacaccttcttaaatagaggaaggaacctgttgatggcatgttctacaacccagacatccgactgccattggttaaggcaagtgaaccacgtgccacatacagtgtccatgccacacttgtgacgacgggagggtgtgtgcaatctcattatccccagttagcaggaaaggccagaggctccaggaggtgaccaggcagaggaagccactgctgctgaggctgtccccactggggcttgtgagctgagggaggtgggctcggctaaacatgaaaactaggagaggaaacctgcccgcagcttggcttttgctggatgacaatgtggctccactttccctatttccagccaggcatttcagagactcttggcagtatcagtccataccgcctccggaggcaccagctacagtgtctgcttgtgcatagctggcgggagttgcctctactgaactttcctcccatgggctctgtggagctgctcctgagagctggacctgagagcggacgggcccagatacccccgtgcgggagctcatagctgctggtaagccagggcggcatgtgaaagtgtctgttcactcattcacacaaaagtcctccttgacacccacaatcctgggcaccaggatgcggccccaggcagggctggtgaagtcttttctcctgaagctcatgttctaccagaagagtcacaaataaaaacataacgcagagaagtgacaaaggatggcaggggtccaggaagaccgctcccaggaggtggtctttgtggagagagagaccctcggggaaggacttgatgacagagggcgtggagggcctcatgcatcgattccctgctgtctgctggctctggccacaggcactcactgaggcccatttcataggtgggaaactgaggcacagggaagctaggcaacttgccgggagtcctcatgctaagaagcagcatgggcaggcttcaaagccaagcccccggctccagggctcgaacacataacccccgggctacacacagtctttcccttgatactcaccatatcctgtggctccaagtgaagatcccgtgcatatctaatgccaaaggacagcagccctgggcactagcagcctggctcacagaaagcagactcccccaccccgcgccacattcccccaccatttctgggtgtcctcaggggagccttgagtcggctcatggggaggtcaggcagctacagcttcccaagctctctgggccaaagggctggatttgtgttgctaatcagacacccatatggggtcccctgcagctcacgtcacacacgacccactatgtgagtctgacatcacccagactgggctgagctccgactacatgcttgggggtcgtggcgctgccatcgtcatgcttttaaaagcacccccaatgtctgtgcttgtctcatcatggatgggccacagaaaggcctcatgccacaagaagcactcagctgtgtggccaagtggccaagtagcatccatccgtttgtctcctagagctgggccacacaggtcccctccgcctgcccgaggggccccagcatgtctaactgacatcatcatacaaacaagagcatgcagatggagggtgtgtccccaaatgcctccaaagccccagtcattggttcaaactctgaggtctgagcgctgagcttccgtgctcaaaccgctgctgaccttcacgagctcggtgctgcagctctgctgccatgggtccagcctgcaagtctccagcaactctagcagcttctggcctggaagcagctgcccaccccagtgtgcctgtgcccccacgctcctgtgctttctctccaggctgggcctcccaccaacatggccctctcccaggagggatccaaggctagcatagctctgcatgacaggcgtggtggatcagggcacctgcccagctcagccagtctccagtgccccttcctctgtgccaggcggcagcagcacccctggacagaagagacagccaggaaggtggtctcatggaaacccagtggagcagagaaatgaggaaataaagcacattctatccaactttaggcaggaaaagcagggattcgccccctgcctcatttgctttctcttcctagaacaaccattaaacttttcccatgctcagccaccaatatggattcaatctcttttcaggtttgcttttgctgtgagaatgactccagtcatgttttgtgttctcaggcactcactgttcatctcctagaacaaattgggatgcccttgggtttggggcttcctgagcctccttcctttgtaccatcttcgtccctgtttcagaaacagaagacattatttttatttatttatttatttatttatttatttatttatttaagatggagtctcgctctgtcacccaggctggagtgccgtggcgcgatctcggctcactgcaacctctgcctcccaggttcatgccattctcctgcctcagcctcccgggtagctgggactacaggcacctgccaccacgcccggctaattttttgtatgtttagtagagacggggtttcaccatgttagccaggatggtcgcaatctcctgaactcgtgatccacctgcctcggcctcccaaagtgctgggattacaggcatgagccaccgcgcctggccaacagaagacattcttaagcatgcgctcctgggaggtttgggaccaaggttagtttgatttgttctctgcacaaatgtggtggctgcttcattttaacatgctaaatgttatgaagtcactttgaattacggtagggaaaagctgtagaggcccatctcctttctcaagcctgacaaagcactttataatcacattctttctggaacgtctatcagaaacacgttatattaagatgcaaagctatttgttaaagtcgtcaaactgcaactgaaaaacacgattttttatttttgccatgtatgtttttttctctcatcatcaccaagaaaattgaagtctaaactccagcagacaattaggcctcatggagtggtgtcatgtctgcgggcttctgtgatgcttgcagtggcctttaattagattcagggtctctatatgtggggctccagcttaatgcaatttggaaactaatcatgtttaattaggttgtattattagggaacagctgagcaaatggaagactgtgctgcatactagggaaacttacaaaagcaatatcacaaaacacacagttattaccagcgagatgagcaaaagtcatctgcattacatttgagtgatttgatttgcttccccctggagaggttctgaggcttgtcccgtctttaaggtgttgtgtttagctgtgtctaggcttgggcagacctcacggccacctctctcagaatggaggtgacttgacttcaggcagtcatctggagaagtctcctgcacctgggcaccacacttcagggcagatatgtccttgctgctttttcttagggcacatggttcaaggacagccctggcagctgaaacccagggtttcaacccctctccaagctcacctggtgctgaaaacctccatctcacagcataaacatctgtaagaaagcaaccaaaagatgcctgcatggagactgcgtgagtccaagttccaattgaattcattttctgacagctgagaaaggtgtgagacctggggaggaaaagtccgctatctccagctatctgagttccagtgaggctgttcctgggtcagaaaatatcttcatagaagtacagagtatctcagtgacccatctgtttatatgagaatgaggactctggtttagtcattagatcaatttctggactgagagtccaaagagagggtcactggatttacttcctctgtgtctttgtttcccatctgtaaaatggatctatgaaaattcaatgaatcaattaattcattccttgaatattttatctccagtcactggagatttaaaataatgagttaagacatgttcctgccctcaaggagcagggaatctttagaaagcagggcctgaggcaaggattaagctactgatgatttatggggggggtgcaagcccagggcagtggaggtgaaagaaaagggaggcgaggtggggagggaaggtgtagcctggggtcatgtaagtggcagtggctgtagacttttcctccccagacctcacagctttctcggctgtcagaaaataaattcaactggaacttggactcatgcggtctccatgcaggcatcttttggttgctttgttgcagatgcttatgctgtgagacacggaggttttcagcaccaagtgagcttgcagaggggttgaaacccactgggggccccagccatgtgttcacctggcacatgggcttccatggaaagctgaaagggggtggggggcacacctcaaaggaatccacaggagagagaatcagaaggaattctacgccactgggagtgtcttcccacgctctccagcttgcctcgtccaggccctctgaggctgctcaggaagccagaggccatgccgtgctctggtagctccacttgtgaaggtgaggacttgggtggcgcagcaggtgctgtccaagaaagggaaggaaggaacacctggggagcctgtgaaggtgaagaagtttgtgccttgatacgagcagacacgccagtgaagaggcaggggcacaagtcaagagggaccacaagcattgctaagagagcatggaggcatctcacgtggtttgtggggcacggacggaccatcttccaggatgaaggagcgtgcatctcacacccagcagatgaaccaaatttggccagaggaggaaagggatggggagagtgctccaggctgcagccacagctaggccaagactgggaggcagaagagagccagggagtgtgggaaggctgagctcagcatggctggagagaacaggaggggtctggggtgagctggagcaggggggtgcaagagcccagacatgcagggccttgccagcatggagaggagattggactgagttctcagggcagtgaggggctcccctccaagcacccaggccggctcacggctctcaaggtggcaatctgcttctttctttttctttttctcactttcttccctctctccttccttctgggctggagctcagggaaattttagagccagccactagcgagccactctctccagtcactaggggtgagaaagtcccgtcttccctgctacagtcgtaacgcatcaccctcacaccttgctgaccataggggacatcggctctgtgccgggagctggcagtcttgcctgctgctgacacagtatcagagcaagaaaggaaaacagggtggtgcccaaggatggctggctctactgtccttgctggggcccctctggtcatctcgctggctaaggaaaacccctgaggtgaggctgagtcaccctgtgggaggaggacctggggagtgggttgtgtcttttcctgccatactctcccaggttggtgtcagttaagcacagctccacttgacagtgactggttcaagctggccatgtgaattgtcccctggggccatggcctggttgaccataggctggacccatgactctgatctagccagtcagagtggcccactcctcaggccccagtgattggctcaggcatgagcatgtgacccaaactggaccaatcagaagtcaaagataaggctctaagatgttgtgtaagtgaatgaatcaataaggaggccctcgctggtccaaactagctcagtctccaggtgtgacaggcagaagaatggcctcccaaagtcctaatctctgcagactgtgatgtcacctcacatagcaaaaaggactttgcagacatgaataagtgatggatcctgagatgggaaaattatcttggattatctgggtaggtccaatgtaatcacaagagttcttagaagagaaaaggaggagggttcaagagagagaaggagcggggagagagagagggagggacgatggtggaagcagaggttggagtgatgcagttgctggctttgaagatggaggaaggaaccacaaggcaaggaatgccacggcctctagaagctggaaatggcaagggcatggatggtcccctagagctgccagaaggaaggcagcctgattttctccttgattttggtccagtaagacccatttctgacttctgacctccagaactgtaaaataatacatgtgcattgttgtaagccatggatttaagccgcggtaacttgttggagcagagaaaggaaccaagtgcacagggtacatcagctcttgctgtcaggagctccttcatttcagaataacatcatcttctcatccgagacctggggattagtattgcttgcagggatatggggcttgatgccttctgggctgctccctggtttttgggttcccctgcagtcaggtgtctatactgcctgattctccagtgccaggttactctcccacagccacagaggtccttgtgccatactctttctcattctctaaatacccaatggctactgttgcattaggcttgggtttcctgtccacagtgtttgaagcttctccaggctgggaatcagccattattctgactgtactgtctgtgggatctctcttttctgacagatggcagtgacatggtcatggccctcctccctgcttccttctccctgtgccccacacataaagtgcatcttggtgaaatttacatgggcacacacgtgtgtagcctcctcctagatcaaacactgaccatccccagctccccagcacgtttctgcattctcccttggagctgacaggtgccccctatatattgacttccatccccattgctcagtttggcctgatcttgatcctcatgtaaatagaattcttccatatgtgttcttttgttctggcttctctcacctggagattcatccatgcagttgtgtgtatcagtagttcactcacctcattgctgagtgatgtccttttgtttggctgtatcacagcttgtttatccattctcctgttgatgcacatttgggtcgtttccaatttttggctgttacaaataaagctgctctgaatatttgtgtacagctctttgcctggacagatgccctcactgctatcatggaaatcctaggagtggaattgctgggacatagggtatgtatatgcgtggtctgagtcctttctctgattaatctcttactgcttggatttcaatgtcttagttttgtgttgcaataaggaattacctgaggctgggtaatttataaagaaaaagaggtttatgtggctcatgattctgggggttggaaagttcatgactgagcatctgcatctggtgagggcctcaagctgcttccactcatgatggagggtgaaggggagctggcatgtgcagagaacacatggggagagaggaagccagagagacagcagggaggtgctaggctcattttagccaccagctgtctctggaactaatagagtgtgaattcactaaccccacttaagggaaggcattcatctattcatgaaggatccacctccatgtcccaaactcctcctattaggcaccacctccaacattgggaatcacatttcaacttgtggtttggaggggacaaacttccaaaccatagcattcattgtcaaaaagtttacttcaattttcttttcttttttttcttttgagatggagtctcactctgtcccccaggctggagtgcagtggcataatctctgctcactgcaacctctgcctctttggttcaagcaattctcctgccttagcctccctagtagctgagattacagaaacccgccaccacatctggctgatttttgtatttttagtagagatggggcttcaccatgttggccaggctggtctcaaacttctggcctcaaacgatctgcctgcctcagcctcccaaagtgctgggattacaggcatgagccaccgcacccagcctacaattttcttcagaagatctctgctcagggaggcttcttcatgggctgaactccctgagttttctcacgtgtgggagcatctccccgctgtcttgacaggacacagtgtctacagtggcactcacagtccctccagctttatggaagttgttttgttgttttctggctttagatattgctgtagaaaatctgggtccagcctgatattccctgcttttcaaagatttgtgttcctgcctgaatgtttgagaagtctttctctatctttgaaattcaataattcaattaggatatgtctcaatgcagaacatttttaacaaaattttcatggaacacaacgtgtatttgtttttctaaactgtaaggtttcagaggtttgtctttatttcaggaaaattttcctgcttcatatttttgaatatattgtctttgttgggcttttcccttcagggatgctcaaaagccctgctactgcttcccctgcagtggcatccatgcctgaaagctctgctcagttttctctctttttttttttttttttttttgcttttttcatgtttactcattttatcccaagcccattctccatgtcaatattttgacttctacttgtatctgatctgctttctgtcatttaaaatttatttcttaggtatataatgatgtcatttttgttattaatctgtttctttaggtcagtttatatcctaaataggattttctgtttttatcattttgtctttgagctctcattttattgaatgtataatttttattaagttttctataaggctaagcaattaggagatattgtcttctgtttctggagatagttttcttcttggttgtgctctttttgaagtatttcttctttctctccttcctttattccctctctgccttccttcctcatttcctttctccctccctcctttccttcctccctcccttcctttcttcttctctttctcttttttcttctactatgtgtgtttgctttgttcccatctgttatgggttgaactaggctccccctccaaaatcatacgttgaagtgctaaccctcagtacttcagaatgtgacagtatttggaggcatagccttaaagaggtgattaagttaaaataagactgagtgggtcccaatcctatctgactagtatccttataagaagaggaaatttggactcacaaagaggcactagggatgtgtatacagagagaagaccatgtgaagacacagcaagaaggtggctgcctgcaagtccttagaagacaccaaaacttgccaacaccgccatcttggacttccaacctccagaactgtgtaagccaccccattggtggcattttgctatgtcagccctagaaaaccattgcatttttttcattgatcttggccttaagcagctcatccaaaatcttctcttgtttcccctgtgctgtgtctgagaccacggaatttcctgcttggcactgggcattgagatctgagtgtttcatattctaccacttacttggaagcccaggaatggttgcaacatcaggagagtttagggaagaacatgtgtggccacgtggttgcctgggctttgctgtcttcctatgccaggctgtcctcccttctggttgggtgtatgtgggtgcatatacaagagtgaccctcggatcaaggctattttctggattaacctgcggtcctgaagcatttactgcagttagagcaggggtccctgatcccccagccacggttcgtggcctgttaggaatttggctgcacagcaggagctgagtggcaggtgagtgagcacgaccgtctgagctccccctcctgtcagatcagcaacggcattagattttcataggagcacaaacccgattgtgaattgcgcgtgagagggtctaggttgcacgctccttatgggaatctaatgcctgatgatctgaggtggatcagcttcatccccaaaccttccctcacccccgcccagtcccgtggaaaaattgtcttccataaaaccagtccctggtgccaaaaaggttgaggaccaatgagttagaggatcagccctcctgtttgcccagccctggttcctcccaggccttggtcagaaaaggtaataagaaaacccattcaagtggctttcctcaggtcttctccagactttgtcagctcccagcgccagttcctgggagttgggctgtctgggttaggaagccagaagggtcaggaggtcagcaggattaggaagccagcgtgccgtgccctgagttttccgattcttctcttggctgtcagttatttaagtttgatcctgtacatgcttgggtgatgctgttggctgttttctttctttgatgattgctgctactttttgcccatgatgtcaagcacggggggaaaggaattctgtgagaaaatttcaaactgccattctcatcctggaggcctaatttatttcatttcaattattctttttttttttttcttttgagatggagtctcattctttcgcctaggctaaaatgcagtggtgcaatctccgctcactgcaacctccgcctccttggttcaagcaattctcctgcctcagcctcccgagtagctgagattacaggtgcccacaacaatgcctggctgatttttgtatttttagtagagatggggtttcgccaagttggcctaggctggtctcgaactcttgacctcaggtgatccacctgcctcggcctcccaaagtgctgggattacaggcatgagccactgcacccggcctcatttcaattattcttgatggttgcagtggctcttcctggggtgtaacaagtgcctgtaaatccaggcagctcagtcattctggtaccacatgtatgatctcagtaaccagctccctaccctctcctgttgagtaatggcaccagtcaggggctcccgttatcccagtctgtagaggagttacctgaggatcagagaggaaaagcacccagatgtcccctgtggtgagccttgtagccaggacgcctccccaggcctcagaatctgcaactccaaactcccacaggggcctgggagaggaaggaaaaaaggggagaaagaattgagggaagacaggaaggaaggagggagggagggagagagggaggccttggtccatttcgaactgttataccaaacttatcacagactgagtggcttaaacaacaaacttatttctcatggttctggaggctgagagcccaagaccaagatgctggtagagttggggcatggcgaggacccacttcctgctccaatgttccctgaatctgaaactggcagagctcagggtttgaagtctgcagacttgggttcaatacccagcaatggtcggggaggaggactgtaaggtgaattacacgaccctgagtctcagttttctcatctgaacaatgggctcctcagcatccacatcacagaattggggtatggggctggaatgtgaagtggctctgtgagctgggaaatgttctgcagatgtagactattttaggaccaatgtttcccataacatgttaggaaagaagacattctggcccaggcctgagagacaacactttctcctgagggacaagacagtcagagaggtcatttagagagcagggaggcaggtccagagggctcaagaggaaaccccagggggaccctgacttctgcttctgggaagagactcccaggaattctctcttcttctttcctctgcctccctcatggctggcctcagcactgggatgacagcagcaagcctctgggtgggggctggggtggcccctggtcattgtctctgggattcctgtcccctggatgggatagctgtagcaatggtgacttcccaattctccacaaatatatgagtgcatacatgtatacactttttgttttagttatatatacatatatatatacatatatataatatatatataataattttttctctgttcttttaaaatgtactgttttttgtctctttttgtaacagtagcttaatctgtttaagagatgtagagcctctgtggtattgtgtatcataatccaaccaagtccctttgcgggggcatgtgttatttaaaacaatcttgcgatgaacatccttgcacgcttttcttcctacaccctggaatggtgccacattggttaggaaggcattcccctgtagactgaataatacctgacctaaaatgacccaggcaatgaggagttatttttcccacatggagagaagttcaaaagtaagcagctgagttgattcagcaattcaacagagtcaaggatgatttctctgcttctcttgctctttacaatacggacacaagatagccactatagctcatccatcacatctgcattgaagactggaagaagaaaggagggtagaattctgagtcagccacatctgtcctacaagcccaagccaacaaactgggttacatggctgactctagctgcaaggaaggcgggagatggcaaaaaagaaaagagatggaaatgaacttggggtagccttcaaataaagaacccatagcttaaccttattgatacagacctatgcccttgtgtagcttacagtcttatggggaagagagatgttaatcaatgcagcacactaatgggtgtataatgacaaactgaggtcgaggttctgcagcaaactttacattctacatccttagaatctttactttaatgccaccattcttggtgctcctacaccccagggcctgtgccagcccttcccatacatgatcttcctaaatctgcagagtctctgtaaacagatataagtatccccactcttcaggttgggaaattgtggactaagtcacattccattggtccccagttgggaagtatcccaggtgggattcacacccaggtctggttggcaccaagattgtagttttgttgacaggtcttcctaggagtcagctgacttgattaatgttttcaaagaatcaagttttcactttgttgctttctttattgtgtatctattttctattttgttttctccccttatctttattagttccattcttctacttgcattgagtttaatttgctctcttttcatagcttcttaagacagaagtttagagtattgattttatacctttgctctttctgaatgtatgaatttaaatctctaagtctccctctaagttttttgctttagcttgtcccacagattttgatgtgttttattttcattacatttatttcaaaacatttaaaaatattctttgtgatttcttccatgatccagttatttagaaatgtatggcttaatattcaaaatatttgggaatagttatatttttgtaattaatttctagttaaattccactgtagtcagagaacgttgtctgtacgattccagtcctttgaaatatattgagactcactctatggttcagcatatgatatattgtagtggatgtttcatgtcacttgaaaagaatatattctgtggttatggggtgggatgttccaaaaacgtcaattggccaagtcgattaataatgttgttcaaatcttctatagccgtactaatttttctatccatcactgctttctaaaaatcaattattcacagggctgtgttttaagtgctcagctgtgattgtggattggtctatttctcattttaattctgtcagattttgcttcaatatcttgaacctctgttattagatgtattcacctttagcattgttatatcttctcgatgcattcacctttttgtcactatgaggagtctctctttatttcaggtaatactctagtttcttttatgattggtgtttgcatcatgtatctttccccatcatctttcattcagttcatctgtgtccttaaagagtgactatcaaagtgacgcttgtaaacagcaagtagtcaggtactgtttatttttatctagtctgataattggtgccttttatatgaagtgtttggctcatttacatttaatatcattattgatatgggtgggttttagtgtagcatgttgtgatttgttttgtatttgtctctaatatttttgttcctttgctcctctttccctgcctttttttggattgagtatttcttagtatttttttaatctcctctattgtaacacttttctgtggttctctaaatttcagtgtgcattcatagcttgtcccagtccacattaaataaatattatgcaatttcatctacaaaattggaacctaaaaacaacacatactagttttctattgttacataacaaatgaccacaaatgtaatggctttaaacaacaactatttattacccaccattttgtttctatgggtcagaagtcccagcagggcctcactgggtcctgtgtcaaggtcctcagggtctcacaagactgcaagtgaggagtcagctggtggtgtcgttttatccaagtcttagggtcttctttccaagctcgcatgattgttgacagaattcatttcttcgggactagataactaagactctccccatccccacctcccaggccactcctttgcataggcagtcaaaaacatcactgttcacttgttcaaagatagcaagaatgtctctcttaaaaacttgcccgatgaggttgagctcacccaggaatatttctcttttgattaaactcaaagtcaaagtgattagaaacttcaatcacatctataaaaatctctttctggttgacgtatagtgtgatctaatcctgggagtaacatcccatcctattcccaggtctcacccacactcagggggaggggattgcaccggacgtggataatttcagtataatttcattaaccacttagttttttgtgctatttttatcatacattttccttgtacatatgttataaatgtagcaataccttgttatcttatttgttttcaatagtcaatagttttttagagaaaatttaaaaagacagtcccatatttatctatatattttatcctttctgatttttaatttgatttttttctgccagatccaggattccatcttgcatcacttctattaatcctgaagaacttccttagtatttttcatagcccacgtgtgctgctgattaattctcttagcttttatttatcagaaaatgtcattatttcaccttcagttttgaagggtattttcacggggcaaagcactttaagttggcaatttctcttttcttcaactttctataaatattttattcccttaaatatcttggcttccatcattcctgatgagtagccagccattatacttacttcattctcccgaaagcaatgtatatatttttttgttctggctgcctttaagattttgtatttttgcttttaaaaattttgatcatcatacaactagttttgcttttactcacacttattctgctgggggtttgcccagcttcttgacctgtctgtcctgctgttgcagctagaagaattccttgtttgtggtagagactcaataaatgttttttgaataaaataaacagatactgtgagaagcaacttatagtcataattaacagtgtgaactctggaatcagagagacctggatttgaattctgtttctagcagtgttatttgggacaagttgcttagcctctgtgagccttgatttcctcatctgtgaaatggggatataatagcaacacccacctaatgcggttgctaaggacattcactgtgtactgaggacagggccttttcactcgggggcatcccaagccttccttctcacccactggagaggattttccctttgctcctcagggttggcatccctccacaccttctgaggaaatgtcctttatattcacatttgtaacttttatggaaagccaaggtagtgagccacacaaaaggaaactaaagcgctgagagaagctatctaaatttatgggataaatgagatggaagaggaaagagacagaaaactgagcggaatagagatttccgggggttcatgagcagcaggctctgaagccgcagaggagagaaaggggattctagggtgttgtgatgttgctgtgggttatgaaatacaatcatgtgtcacttaacggtggggatacattctaagaagtgtattgttaggcaatgcagtcattgtgggaacatcatggagtgtatttatacaaacctagatggcacagccttctacatacctaggctatgtgatataacctattgctcatagactacaaacctgtacagcatgtgactgtgtggaatactataggcaatggtaacataattttgagtatttgtggttctaaacatagaaaagatatggtaaaaatacagtataatcttagggaaccactgtcatatatgcaatctgccatcgactaaaatgttatgtggcacatgactgtagatacttgcaaagttcttgaagagattcaaataaagatggagatttcaattcaattacttattactgggtatgcagttctttgaattcaactccatgtagaagctggcctgtttggagctccagaatttatttgggttataaaagagaagatgcaaaaatcttagaaagttcctgacccatagtatgtgctgtgataataattattattattatcactgctcatcagagaactccatatggaggtagagcctgtgccaggccccatgtcctctgcacacatttattgagcacctactgcataccagttttcactcaaggacctagggacacagcagtaagcaaaggggctaaaggtctttctttagaagcttgtcctctgtgaagggatccaatgtgtggcaaaactccatgccaccttcagatagctttccctggatactgacatttaaaaaaaagcaacccaagaaggctttgctcagctttgagggtgtgagtcaagttttgggatttcagaggaagaagtggttttctgggtggaactctgtgaaaacctctaaagcagtcacagctagtttgaggccttggtgcagaaaaggtgagcctggcagagtggggagtgaccccttccggaggagggcacccacctcaccagcatgcacatttttattgcatgccatgtaggtttagcttgtggtttgcaaacatagctgacttagtcaaagaagtttaggttgtaagtaacaggaaatcacctacgccattgaagtgagacaaggtgagtttaaaaataaggtaacaaaaaccatagggttggaagttgagctgttccttacaaatgtctgtgaccagtaaatatgtaaaccagcctgggacaagacagtacctccatctttctttgttctgagggctcactgaccttatctcatcttctctccgtaagttggccttaaatcttcatcctttcatctatgtatctatctatttatctatctatccatccatccatcattccatccatctatccatctatcatctatcgaatctatctatctatcatctacctatctgtgtatctatctatccatattattccatccatctattcatccatccatctatccatctatcatctatatttcctatctatctgtctatctatctatctatctatcacctatctgtctgtctatccatctgtctatccacccacccatctattcattctctccagacttatttccacttacttgaaaagcacagagtcagatttggctaccctgcagctcacagatttctatctcttctgtttatacaacacagggattgattatcccctctcagtcctaattgcaaatgctcacagaagagacaccagttgtcccagtttgaacccagtgtccatccttggttcagccatctgtaccaaaggcagtcagctcttatcatataaggagatgccgaggctcaccagtgtgggtgaggggtggacacacacctgagaacagtcctttaacagaatgcagctcttcagaaaacttttaagtaataagtatattgagatataattctcattttacaaaattttctctgttaatgtgtatcattcagagttgtgccactatcaccactatctagttttggaacattctcgtcacccccaaaagtcctgttcacattagcagtcactccccattcctctcccttccccaatttctagtcaaccattgatctcctttccgtctgtctggatttgcctattctgaacatttcatataaatgagattacataataggtggtctcttgtgtctgacttctttcatttagcataatgatctcaaggttcattcatattgtactatgtatcagtacttcattcctttttgttgctgaataatattctcttgcatggatatactacattttgtctatccatccatcaggtggcagacatttatgctgtttccactgtttggttattatgagtaatgctgttaggaatattcataaactggtttttgtgtgaacataggtttccatttctcttgggtagatacctgggagtggaattattgagtcacatggtaactctgtgcttcaccttttgaggactgccgggctgttttccaaagtggatatacacctttacattcccgttaacaacacataagggctgcaagttctgtcaccctcaccaacatttgttattatttgactctttgattctagctatcctggtgggtgttaagtagtatttcattgtggacttgacttgtatatgcctaatattataaataatgatattgggcatcttttcatgtgcttattaggcatttagatatatgttttggagaaatgtccactcaaatcttttgtccattttcgaaatcagatatttgccttttagttgttgagttgtaagttctttgcatattttgggtacaaatctcttaacagacatttgatttgcaaatattttctctccttctgtggtgtttctttcacctttttgatggtgtcctttgaagcacaaacattttaaattatgattaaacccaatttactgattctttgtcttatcatttgtgcttttagcattgtatctaggaaagtactgcctatttcaaggacactaagatttattttattctaagagttttgtagttttagtgcttatgtttaggtttatggtccattttgagttattttttgtagataagggtccagcttctttttttccatgtgggtgtccagtcatcccagcacaatttgttaaaaagactatttttgccccaccaaaaataaattgattacaattgtaagggcttacttctggaatctcaaatatatgtacatctatatgtctatctttattcacaatttcttgattactttagctttgtactaaattttgcaattgggaagtatgagtcctccaatattttcctttttcaaaattatttcatccattctaggttccttgcatttccacgtgaatgttaggatcaccttatcaatttctgcaaaacgggaagctgggattttgatagtaattgcattgaatctgtagatcaatttgaggagtattgccatcttaataatattaatgcttcaactcatgaacatgggttgtctttccattcatttatatcttctttcatttctttcaatagtttttttttgtaattttcagtgtacaagtctgacccttcttttgttatgtttattcttttcaatgccacttttagtacgttggctttcttaattttatttttgtattttcattgctagtgtatagaaatacaattgctttttgtatatttattatgtatcctgcaactttgctgaactaattattagcttgaataggttttttggtgtgtgtgtattccttgtgattttctatgcatgcgatcatacaatctgtgaatagagatagttttacttctttcttcccaatgtgatgcttttatttctttttctttcctaatttctccaacagagagattgtatgtatatatgttataaatctataaacttttgtaggtatgtatgttataaatctatgggcttttaaaaataggtttataatgtacatacagagaagtgcatcaatcataagtgtatagctccatgaatttttacaaactgaacatatttgcataaccagcaaaccagagcccctccttcctctctttccagtcactcctgcaccctccacccaagggtaactactaccctgacttcaaacacctaagattagtttcacctgagaaactcaactctcaagggtcatttccaatccagagaaggagaagtccaggaaatctaagggaagcaattgagaaaatgttcctgttcaacctgactgcaggcccctagtgttgcgtggggcatttattcagtctgcccccttctaatgcaatggccagccaatatggggtgcctgggcacctcagattagactccatagaccctcaacccctaaagggacaaatcaaaatgagcctcaccagacccagtagaagtggccatgagggatacatggcctctgctttccaaacccctctcagcagcacctcagcagtgcctggtacatagtaggtctgcaatggatgtctgctgagtggaaagatatagcaaagccatgaagtctaaaggagccagggacaatgggaaatgaggacattctgagcctgaaggggttcccatggttcttgtgctggcccaatgatgtattgtccagacctgctttggggaaggatttgctgtccactgctgtcagcttctgcagggtctgccctggctgcagagggtttcctggaccatggtgtgctcctttcctggagcagccatgtagggtgactaaatgaggtggagaataaaggcttgcccatttcatatgttgtgcacagtctgatatgctatattctgatgggctatactcaccccagagctacccaccagcttagccaagactttgctgggctgcagcacagctggacttctccctctacgcagcccggcttctcttgcatcttttctcaggaactggtccctcatacacaccttgcaccccaaacattctcacagtatctgcttctggagagccaccctggctgacctgagcatccccttccagcacctccgtctgcaccgtggaggagtcaccttaacgtctcctcccaacataccctgtgcttctgtatggcagggcttatggtcgcttgttttatttctgctgcctgccctgtgcctatgggcacaggactgatgctcagcaaacatctgcatcatgattgaatgaaaccacagcctgttaggaaaataggaaagcaggtctcaaactttttgctcccaaggctccattacactcctaaaaattatggcagacctcaaaaagctttcatcacgtaaggttatatttgacacagaaattgagaaattttaaaaaatgttaatttatttaaaataattataataaacctgttacatgttaacataatacttttatgaaaaataaattttctaaaacaatttttttttaatttttgcaaatctctttaatgtctggcttaatagaagatagcagattctctgctctatagtcagcctgttgtgacaggtcattctggttgaagtatgtgaagaaaatacagcttcatgcaaatatgtactattgtcccttgtatctgtgggggattggtttccgcaccactgcgtctaccaaaatgtgcacatactcaagtcacagcctgggggaacctgtggatatgaaaagttggccctccatatatgcaggtttcacatccttggatactgtgttttccatctgcatttggttgcaggtgtgggactcgctgataaggacggctgactgtatttattgaaaaacatgcacttataagcggacctgtgcagttcaaatccatgttgttcaagagttgactatagttggaagaagtattttcatcatctttgcagataattatgggcagtgttctttgataatacaccaaaactcaacaagtggtagtttcttaacaattacttgcaaggtggaatctgaaacatgtcaatgaatttgtctgtactttgttacattaaagtctatggtgtattttgctttccatatagatctttaacctgtgcatgattttgatcttgtagactccccagaaggatcttgggcacatgtaggtttccccagatcatactcttgagagccactggtgcagggagtaaaggtagggaccccttacatgccatatgaccagacccaagtgacttactctaaggtctttgttcctcatccgtgaagcaggatatcaatagcatctgtgttatggggctgtggctggtaccacatatgatgagtaccattcagcatgtagtaggtgcttagcaaatattaacaatcattatgttttccctctgcaaagagaaaaaagatgggaagcagatgtccccttcatgaacaggaagaagtaagagagttagcctaaatggtatctaagtcctcccactggctattatgctcagtcctgaccactttatctttcatggcctttgactctgctatgtacttgaacttgatgttccttaagtgtgttgtcatcttagggcaatgccctgggttccatggtggtggggtatgatgggtttggctcaccagcagtggccccacaaatcagagaacacattaattagtgacacagtcccagggctctcaggacttagatacagtttttattaaatatgaatggtcttgtccaccctaaggaatgatcctcaaccacggggaaaatggccagcccatcgcatcaactccctttgtcccactaattttccccagtgattatcttcttttctgacccttggggccatggactatgtgagttgcctgaaggcctggtgtccagaccagagttccttgagctgctcatctgctttctctctgagctgcttatcctccaccaccttcagtccctctccagctaggctctggccctgtgggctatgtccccttggcagagcctcagttttcccatttgtgaaatgggatcattgtagttcgtccctcccagagttgattaggaaaaactacacaggcggaggcggacaaatcacgaggtcaggagtttgagaccagcctggccaacatggtgaaaccctgtctctactaaaaatacaaaaattagctgggcgtagtggtgagcacctgtaatcccagctactcagaggctgaggcaggagaatctcttgaacttaggaggcagaggttgtagtgagccgagatagcaccattgcactccagcccaggtgacagagtgagactgtctcaaacaacaaaaacaaaaacccatgaagcacttatttcattacaagcacccattaaatataagaattattattgttattaaaattatttaaaaataaatataataatagtaacatttttgaaatatccactaataaatttcccctttttggtcatctagttgcctttcttgcaacttttctagatctacactgccccagagaaagcatgggaaaaagtctccagggctgaatttgctttcccatttttcagcagaagaaactgagggtcggagaacatgggtgagccactcaagatgatgcagccacattagtaataaatagatgtgacattcattgccagatctgcttgaacctggaaccttacattcacttgtaatacaaagagttaaaacaagcagatagtaggcaatcaatataggtaaatgtcctgtgctcacttctcagactgtcagacaccccagacaacaagagcaggtagaatccccaagtctcagctgcctagctgggagcctcccacttgagcatagcctgaactttggggtccgctgttcagagcaagcgtcttggccaactttaaagtaagtggttagtggctgtccatcagttttaagttcttcaatctgggtggggttggcagtaaccctgtacttcccaccatgggatctatagtgatgtctccttggtcatttttgataccactaatttgtgtcttctctcattttttctcggctagcttggataaagggttgacatttttatttatctttacaaataatcagcgatgttcctaataatttcctatttttaatttcatggctaatttttattgtttcttttcttctgcttgctttaggtttatatgtgcttcttcctcaaattttttaagctggaagttttgataattcattttagatctttcttcttttttcatataagcattttatgctgtgaatctaccattttgcttttacagaatcccacatattttgataagatgcattttatttttgtttaatttaaaatattttaaaacttctcttgtgatattttttttgacccatgtgatatttggaaacatactgtttaatctcaaaatatttgaggatttttaagctgtatttctgtaactgatttctagtttaattctattgtagttcaagagtatactttgtatgatttctattcttttaaatttgttaaggtgtattttatggcacagaatgtggtctgtctcagtgaatgttccacgtgagtttaagaggaatgtgtagtctactgttgatggataaagtagtttatggatatctgtaatatccagttgattgatggtcctgtttaattcaactgtgtccttactgcttttctgcctgctagatctgtccatttctgataaggggatgttgaagtctccaactgttatagtagatttatctgtttctccttgcatttctatcagtttctacctcatgcattttgattctctgttgttaggtctatatacattaagaattattatgtgtttgcaatatacatttacaactaatctaagtcctctatcaaccaacactgtactatatgatgagtagtaaaagcacctgagcattctcaatccaattctccatctgtcctttgtaacattgctttcattcatttatccataaactataataacctaatgcatttttactattattattttgaacaattttctattagatcaattataagaaaaataaaagattttattttgccctcatttatacattatcaaatgttcttcctttctttttgcagatttgagatttccttttgtttgaagaacttttaaatctatttcttgtaaggcagatctactggtggcaaattccctcagtttttgtttgtttgagaaagtcctattttttccttcacctctgaagaataattttattgaatatagaattctagattggttccccccaccctttcttttgacatttaaatatttcattcaagtcccttcttgcttgaatgatttctgtagatccttgttcctctgtaggtaagatttgttgtccccctgatatctcacttctggattttttcaaaatggtctttctttcttcgtttccctctcctttacttttcttttccctcccctcccctcctctcctctcctctcctctcatctcctctcctctcctctgctctcctctcctctcttctcctctcctctcctctgctctcctctcctctcttctcctctcctctcctctcttctcctttcctctcttctcctttcctttcctttttccttcttttcttttcctttcctttgaatatgtcacaaaaaaagcttaggtatgaattttttttggcaaaaatatgcttaggtatgaattttttggcaaaaaaatatgcttaggtgtggtttttttgggcacgtatcctgctttgttctctgggtttcctgttgtctgttatcaattcggggaaaatctcaggttttattacttcaaatatttcttttgcttctctccttcttttgctgcttctccttctggaattctcttttgcttcttctccttctggaattctcttttgcttcttctccttctggaattctcttttgcttcttctccttctggaattctcttttgcttcttctccttctggaattcccattacacatagttataccttttttaattggcccatggttcttaaatattctgttgtgtgttgctgttttcattcttcttgcttttcagtttagaaagtttctactgacatatattcaagcctactgattttttcctcaactatatccagtctactgatggtcatcaaagactgtcttacttcctgttacagtgtttttaatctctaacattgctccttgactctttcttagagtttccatctctccatttacattatctacctgtccttgcaggttgcccactttttccattacaggccttagcatattaatcatagttattataaactcccaatctgagagtcttagttatctagccccaaggaaatgaattctgtcaacaatctctgccatatttgagtgtggttctgagtttttttttgttttgtttcatttattttacctttagtatgccttgtaatgttttactgggagttggacaatacgtattggataataggagctgaggctttggtgtgaagatttcacaaatctggctcagagttgggatatatttaatgtttgttgtaaatgtaggtgtcagaggcttcacctccctctagtgtccctttttctcccctcttgtctttgagtttcccttgaaactcctttggaatgaagtctgtgtcttgcagctctcttggttgtgaccgattgttatagtggagtgatgtaatggtaaggatgtaatggtgaggatgtaatgataaggatgtaatggtaacccgggggaggaagtgttctataatcttctaattacatctctgggttttttaaaaagaggaggctggaattcctaggctgtgacctccagagagtttcttagccttttttttccctctccccttaagtgagacaagaaggctagagggggatccagctgtctaattgcccatcttctagggcagataaggctgcagtaaaagattttcccttgagtacaaatctttgttgaggaaaacagaatgttctggatatatttcaaaatgctcgcttttccttcccccctgctgaaagcatgaggggatttttctgagaacttggtggggctcctggagagaaaactcatgaacatgtgggggccccttgtgagactggccaccgaggagtttttcatctccagctaagtccacacagcctccagctgtgcagtgactaatcagttaccgttggcgttcctacctgccatgggccccagcagcttctgatccctgtgtgctgtgattttagccacctgtctgtctcccagattttggagtaatggtctacaccatgatcacaattctctaatggatctaagaattgttgattttcagtttgttcggcttttttcttgttgtgaggatgagaacgaccacttctaaggtctttatattttggagcagtaactggaagcctccctgaatacatttgtaagtcaagttgtaatgtattttattggcagttacttgcaggctcttgaaaaactcagatcaaaggcagaaatgatctcctaggtaagctagccacgtaattgcctccattactccaagagccttctgcatgtggaggcatgtggccctctgtcagcgttagagccgggacagcgcatcctctcagctcggattggcaggtaatgcgcggccatctcaagcagcacctgtggggaaggcttatcccaggtggtagtttgtgcagtcatgagtagggccaaaactagggtgaagcaggaccctgataatgatgcccccctaaaatttgcatctttgtgccttctcacctcgccctggttccagccctggttataagcacaggctcagaatccggtctgcctgagctcatctccatctgctacctgctcgctgtgcaactttgggtgagaaaataacctctctgggcctcagtttcttcacttgtagagataaggatagtgcttactagcaggattgttatgcagattaaatgaattaacatgggcaacaacacttagagtggagtctggccaatcacaagcctccaaagtgttaacctcttttgctatcttctcttgccctgtgtagcagaagctgttggcccactcagatcccctaagtccctaagttggcatgcaccttggcctgcccacctctgcccaccttggccatcctcccttctctatttggctgccagatggctttttcctgagccccaggagcatacttagttcaggaacctgcttagcaggggcaacctggaagtaccggggacttagtgttcatggcagttcccagccacaagcagcaggaatcggggtgaagaccccactttccaggcctcagtggcacaattctggggtcattctgcacagggaacatactcataactgcatctttcttgtcctgcccccttcccctctcaccttcctcacccccctcactcctgctccccagaatcacatccctaattaacttcatcccccagtgctctttctcaagggctgtttggtggggaaaccaaacaagtcatcttctcagtggtggtttttatctatggaaaagccctctctgtttggtttcccagagctttcatcctgtgtgcacgcatgcggtgttccatccgggcagccagtgtgtccttcgttcaaaaacacgtcctgtgcgcctaccgtgtggtgaggcaccagctggcaaccatcgggtcaagctcttatccagggcttggggctgcctgtggtgggacatgtcatgccccctttggggccaacacggatcggaggaggtggccggtcagtgaggaagggtatgagctctggactctacctgaggggctagaccttggctcctcctcatgatagccatgagacctcgagctagtggctaaccgctgagcctcagtttgctcatctggggcccgtgggaagaggtgacactcaggaagggctgagcccttcgtgcctgagctcatttgctctgttggattctggtgaggagaaaagaaaagcagaactaaaggggttgaaagcaatgggagcccattcctgggggccccgagggggctctgtggagctggcagtgtcttgcttcttgatttcggggctgggtcatgtacccaacctcaccctgtggaatccacccagctgtgtgctgaagctcactcctgtgtcagcggagatttccggttcaatatgaaatgtaacagggtccgttcttctctccacctcctggttcatggatgaactggatgaattgtacatcatctatataaatagaaaattatctccacccctaccaaaaaaccccaaacaaaactgctttccctttaggagagagaaaagccgcagaaccgcagggaaggagatttgcccacagaacccccaaaagacatttccttattctcatgatggcgaatcatgatgatgacgtctgttgaagattcatcaaagctgatgcttttgcccccaataaaataaactttttcttaaggatgtgacagagagacatagccaggaaattttattacacaaaaaaaattaaaagggattgaggaatctgacttctctttcatggcaagcctctgtgattttgacaattcactgacgaaagaaaaaaatatgaaacgaaacgtgtcttcttagcagtggagaagtctgtctggtgaggaggttttgggggaagaaagtggaaaattccccttgccttctccttcctctagttgcatggcagcctacgtgggcctcctccgcgcctcctctctcactggctctgtctcacctgggtctattcccgtccctcattctctccctccaaacccatcatttctaattctccagctatatttgctcacctgaggcctccctgccactcccctctccctcccctctgccttctaaaagagtctccaattcccccaccaaaggattctctctggtcacagctgtcagctgtgagcttggagacctcaccctgcacacttgatgtgggctcgctcctgaacacattcctgagacctgtcccagccctgggggtcagcgtctccacccagagaatcttccttcaactccctgggctgtcccctcctgccaacacatccctcccaccccaggggatctgggttttccagggaacgtgtgcaagtgtgtacaccactggcaagtggcagggatgggatttgaaatcagttccatctgaccttgaagtcctgtcccttggtgtgctcctctccctccattcctgccttactcctcccacccgctgcactttagctccccaggaccacctctcaaatgagccacccaggcctttccgctgctgctcctggggactgagctaagacgccgctttcgcctcaccttggtccctgctggtccctctgatctccatgataagctagcatccatgtgcccagaggctggcgcaagtggttgcctgctatgtgctgtccacacactggcttaacccctgcacccctcagagacggccttgcatctccattttatagatgaggaacgtggtctcagagaatctacaggtctcccaggtgccttgtggtggtagagcaggatctgcccgattccaaagcctatgctgcttcattttgactctgagccctcaaacctgagaaatcagcagatgccattcttcaggtggactcacgctgggagccccaatatgtggaacagcagcaagagctgcccgggccaagcaggggaggcttgggagattttccccactggcagccccacaccccaagggccatctagggagcccccggcttccttcccaaaggagtcagtatcttgggaaaatggcacattcaggaacatccactgaaattccaggcttcccagatattttgctgggggtacttcagccacttaggttccaaagctgaaattaagttcactcccaccagcctgtgcttgggggcacagccctgggcatggagggctcaagactcacaggtcttgggctcaggagcccacttgcagaggaagacatgaggcttagggcagtggtgggactttcaggtcacccaggcaagtccctcgacaccaacccccaacttccaggtcaccagagcaagggggctgaaacagagacctcggggccaggggctcagtcacctctgagctgggaacactggccaaaagctgctcttccctagaggcatggcagagaataaaaggcctggaaagccttgtctggtgctggcctgttggaaaaccccgttcttccattttaataccccacaaagccttgggtaccactggacgttggacctgcctttcgcagagtccccaaatgctctgaagcctgcaccccactttccctgcaaccaactggcaaacagcctccctcagatcccagctccgggttcccctcgctgacaacaggggtttcctctgccctacggagcagcctcttcctggacccaggtcccagtccctgttgccccagacacagtggtttacagacaccacaggtttacagacacacactgagctgctgtccacccatcaatagatgtatctaatttatctgctttcaggtacagggaaacaaggtgctgtgtctgacagtgatgggcagggggccggcgagccccacagaagagctgacagtgtcatcctgtctatggacgggaggctggcgatggtcatttttcaaggctttgatgcggtgtctgtgagttgctgggtgctgtccgctagaagcagccctgtggcctgagctgtcccttcttccagtgtctccgctgggccccgcccgactcatcaaattccttttcccactccacctccccatggggtctggcagtttcacatgagtgaggttcaccgccacaggcctcctgtacccggacgcagagccatgtttccttcactttgttttgagcttacgaattttacaaaatgactgtgtaggttgcgtccatgtttgtgccccagatgaaagctgagcaacagtgtccctttttcccacaaatattccagtgtcagttccagaccccaggaacatgtgggtccagacacgtgtggtcacaggcctcaagggactgatttgaccttggggggcctcagtttatctatgctgtgaaacagggctgccgggaagcgtgacagatttttgctgtctggcctctctgggtgagtctggctgttccttctcaagggatttgcaggaagggggaggtggggcggagaaatttcatgtctgcctgagttacttccattcaagaatggttcctgcggagacaccaagagagctgggtctgatggcagagctgtgtactggccctactgtattagtttgttctcatgctgctaataaagatatacccagggccaggtgcggtggctcacacctgtaatcccagcactttgagaggccgaggtgggtggatcatgagttcaggcgtttgagaccagcctggccaacacagtgaaaccccgtatctactaaaaatacaaaaaattagccaggcatggtggcaggcacctgtaatcccagctacttgggaggctgaggcaggagaattgcttgaacctggaaggtggaggttgcagtgagccaagatcttgtcactgcattccagcctgggtgacagtgcaagactctgtctcaaaaaaaaaaaaaagacatacccaggactgggtaatttataaaaaggtttacttgacccacagttccacatgactagggaggcctctcaatcatggcagaaagtaaaggggaagcaagacacatcttacatggcagcaggcaagagagaccatgtgcaggggaactgccctttataaaaccatcagatcttatgagacttattcactctcacaagcacagcatgggaaaaacctgctcccatgattcaactactcccactgggtccctcccatgacacatgggaattatgggagctacaattcaagataagatttgggtggagacacagccaaacctaatcacctactaagggctggccatgtgactggtgtaaggttctgtaatccagcgtaaccaacttttccctcttggctcaggacgattccagtgttagcactggaaatcccacatcacaggaaaccctgtagtcccaggtaagccaagatggtgggccactgggccttggcttcatcatcaatagagtgatgatggtaataggttgtcatggagacttaatgaggtcatgcaagcagggtgcatatagccagacacagctcaaggcagggtagctctcgcagttagccaacaatggaaaggaagggagtggtgccctggcagctggagtggcagtgggaagacagcctcagctttgccttgggcctccctgcattcctcctccgcagggcaatattcattattccgcagggcaatactccacaccaggcaggccacactctgtgactcatgggcatggctgggtctgggtgaggctcactcctcaccaccttcattcctctcactgtgggcatgggggcttctgtgccagccatggctccaagatgaaaacctggctcctcacagcactctggctgccttgccctgccctggtgtctgtggtcctggctgggcttggttgaatgcagagagctgtcgcttctgagaccttccctttccatctgagcccaacacagtcagagggatgggggctggcaggtctcagtaaaaaggagtaaaatgagctttctttcatttcccagaagtagtcctaaatgggttttttatttaactctcatcaagtcatctcaagacaagtcaactcggattaagtctatttaagtctgtgcagatcagttcagatcaagtcaacccagggcagttgaagtccactgcactccactcctttccatcccaatcagctatttattgagggggttgggggggtgctgtagaaggcactggtagggttcccaaggcaagtcatgtgggtccgtcttggaacttcagaatctagaggacaggtgtgatacaaaatgcttaagccgtagtggggcagcttagtgaaaaagaggccagaagtccctctgcacttgtagaattaagctggaatctttgccctgaaatctactggccatgtagcctgagaaaaagggcctcactttaggtgattaggaccctggttagcggggcctaaccaggcttggcttcgcttcttccctttctccagaaaatggggaagaggatggcagtcaccttcgaatgtcgatgtgagcaggagacaaggtcacatgtgtaaagggtttagagacacacctggcccagagggagcacacggcacatgggagaaatatattattgttttattgctattgtcaggattattcctctggctcctaagggcaacgccagtgcaaggtgagatgacttaagagatgagggtaaaacttctgtctccttgagtcttgaactgtccccctccccaatcacagctcaacatcggatcttgtcaagtggactcaagtgctggcctcaagctctttgagggaggcaacagctatccaaagcccactcaagtccttcccctccgacttgttcagaaacaactccaggagaataaatagagtccttgagcccaatacaatgaagaggtttcaaatagagcaccttgaagatgatgtgggctgccctggcctcctccgatcccgtggtggcccaggcgcccctctgtccggccctcgctccatcatgagccctgagaaccccagctcactggggtgctgactcttatttagtgcctgagcctttctcttctccccaaccccaagaaggctccctagaaacattgcttcccaggacacttcacaggctggaggcaagagccgtgttcagagcacagacacattggggttcgaggccttgtgggtcacttgccatctgtggttggaataacctaaccccttgagcctcagcatcatcgtctctaatgctaaagtaccaacattggagggttcacgtattcgtttcctgggggctgccataacaaatgactacaaacgtggtggcttagagaaacagaaaggtattctctgaagtccaaaatcaagaaatccagaaatcttgctggatatggtggctcctttgggaggccgaggagggtgaatcccttgaggacaggcgttccgataccagcctaggcaaatggcaaaaacctgtgtctataaaaaaaatacaaaaaaatttagctgggcatggtggtgtgcacctgtagtcccagctactatggaagctgaggcgggaggatcactcgaacccgagaagttgaggctgtagtgagctgtgattgcaccactgcactccagcctgggtgacagagtgagtccctgtcaaaaaaaaaaaaaaaaaaaaaacccagaaatccaaaatcagggtgttgaagggctgcgctacctctggaagctccagggaaagatccttccttccctcttccaagcaaggaagaggcatctttggcttgaggcagagattcatcttctggccccaagatccggaagatggatatctgcctccaccttcacatggtttcccctctctgtgtctctcctctgtgtgtctcttataaagacacttgtcattggatttatggcccaacccaaataaatcaggatgatctcattctagatgaatctagaatgaacgaattggtgatttacattcacaaacaccccttttctaaatgaggtcacttgcacggtttctggggaactgtgacctgcaatacgagggctggactcaggagtccaggtcctggtttcaagttgtggcttcatggctctgcgctgcgatctaagggaagtccttagacttctctctgccttaatttttcaagctataaagaggggattctaataggatatatttaaggggttatttggatgattaaatgagtgaatacttgtccagggcttaggatagtcctggccatatgagacatggccactaaatgatagtagccaacattgttattttaaaactgaagttgatattttatgctactgtgcctcggtcctttacctaattcctttcctcttgcctgcgattggctcctctctggttggccctgctctggggccttttccacaccttcccaggaacacctgcttacctgcaagctcctgcgcccatttgtccctcaagcctgtcactgggggagccttccatccattaaaaatattgctagcccccatcccctttggggcagaacattaaagtgcaatttctgtaaagccactttataaaatgagagcagttgaacgttctcgggtgtaggagtaattataattcccaagtttctctgaacatttttctaactggatctttttgtgtcgttgtctcagaatagacacacttgtgggctttcctaggctcaaaatagttgtgagataggggttgaaatcgacatccgagtttgaattacaacaacttggttataactttggattggatgaatttcaccagccaaatgtggttctttctgcaaatatggcttccttttatggaataacaaaattcctgaaccagggctgtgcctctgagaagtggtcctttagcagaagggtgggtggccctgggctagaattggagtgtctacagttggctgcgtcgatccactgtctactctggacgaggcctctgatgaagactgagctcctgcagctgggcttaagagtctccaggtctgtctctgtgtgggctcatcctccatcctgtcttcagcatatctcagtaggtgagagcttcgaccccagagccaggtcaatggggttctcttgtctcctccacttatggctatcatgatgggggacaagttactttatttctctgtgcctcagtttcctcttctgttgagtgaggatagccatgtacacatctcctggggttgctgtaaagattaaatgaactgatacacgtaaggtcctcagaactgtatctggcacagggtaagtcctggctattttgattgctggacacatggtaggtacacactacatgtttggaagtcactggtcctccacttcacaactcaaggggtcttaaaagacaagcagggggctctaacgggaggttctctgagagacctaggtagctgccaccagtaattcagggatggccagtggggaggagatggccttagtgacatgcaattgcaggtccatgagggaaagggaattttccatcctggactctgcattccctttcttcagtgtgacaaaaatgcacttaaaaggcattaaaacattgtcttccaccccctaccccgttccagggtgctgtttcaatagacagaatcactctgcaatgcaagagccctggcagcagcttacctagaggcacggcttaccttcaggaaacctttgtctctggtagtgtcctggggtaaaccctacccctacccgtataacagaaaaataatacacttctttttgttttttaaaacaatattttatcgatttaactgaaactgtctggtcagtggatcccctcctgtactgggtgaggcgtagaaagggagggagaggggcctgtctgcgttttattaaccctttcaatgtgtgactagaagatcacgtgctctcggagcatggattgagggggcaggccctgagtctggatctgcagtgcctgatctgggtgcaggttgcctggtgggatctcctggttcatgccaagggtctctgcacttttctgaatgtctgttatactgcagtcaaaggaaaagacggcaatacttcatgctccaagagcttttccactaccgagctttctcctctcatagaaagtgcaagggaaagagggaagtaaagaggccagtctcagttgctcgggcaaaggctccaatgaggtaaccgaagctgcaggttgcctggcacgctgctgccctgagcctcttgttggctgatgattactttatctgaagaagataagatgtcgtgcatttgattacagcataacttcatgcactctgacagagcttgcagcactgggcgaatcgtcatcggaatggttttgttatttctgtaccgtgtgcctctgagttaaggataaagcaggaataaatatggaattgggggagggggaaagtgctagcagttcttcctcactgctaggaaaatcactctttcaaagtcaccacgttctctccttcattaccctttcaccactgtgcgtcctgctcataagagtgtccaacgaaaggaccaggttttgtctggtttctctgagcactttggtgaaatttaatcgtacttaaatggcaaacagtaggaagaagagccggcaaaggtaggagccactttgagacccagcctatagttgttcaaagctgacatggctatatttaaccaaaaggacatgatattaaactttcttttaatgggggagcttttggaaggcaccagacagggcacaggtgttccagcctcaggacgctgcagcaacatctgcctcacagggcttgtggtctatcaggaccagaagatcatccacgaagaagacagtgtaagataattgtaacttacatacattaaatgtgcacattttaagtctgcagtttaacgacttttaacaaatgagtacacctgtgtaagcactatttcaagatatagaatatgctccaaacaccaggaagttctgagcatcattttaacaagagaagccatttgacaaataaaaaacaaaaaatgaaaaaaaactctcttatttatttgtgaatttaacatagtttttcagcttgaggacttctggcttatcacggcttaaaacaagactgttctctgcacaaaataaaagcttatcagcagtgagaatcattcttttctcagggaaagaaaggaacattctttatggcgtggctaagtgggaaggcagttggggcaccatccttctgactccatgttctggagaatctcatggtgtctcctacctggagaaggaccttctggccctggtagactaccagccctgaaaggtaaaggttgctgcagcatcctgaagccagaacacccacactctgttccagcaccttctcagagtccccagcctctgttctgaggcctccttctgattttagactggctgacgacacccggattactctgacctgcaaggggaggtggctgaccccaaagcaggttgagctgattggcatgtgatggcactggatcccagcgagtgcccctcatgctcactcccaaaccccaaatatgcttccaaatgccacccccacccagactctcaccacagagatggggttgtgatgaccacaaggaagaggaggaagaggaccccaggggcttggggcaacacttgctggggagggtctggctgggcaccgtggcaacgctgtgtcaggagagccgaactcagagaagcaggtgtgatgcctcatgtcattgtgttcccagagctcagggccacattcagcctgaggttcaggctgggctctccgatgcctttgagacttcgcatctgtggttcagtctgcctggaaaactcctacacatccctgaatggcccagcctgaatgtcacctctgtggaaacatctcctgagtctttcagtcaatgccctggacttccctcccctgtgtttctcccaggttcctttgtttttgtgcttatttttttaatggggtttgtttctttaattttacttttttggacctcagaggcagagatttgaataaattgatcttctgggctcaaaactcgtaatcttccctggtccctggaaaccccctgccttgcttcacttgttctctttcttactccctctctgcatccatccctaccctcattcccatgcctgtttccccgaccctgcacagcccacaccccggacttgatgcgtgtgtgcaaatcctaagtgtcttcccaaggagaaaaatacccaagaacacagaatcacatagaactcatgtcttttgccttccttccctccctgccccgaccctcgtaaagctttatttttattgccaaaatttctgctgtcatctttgggaccccagagagtgggaggctttgaggccagaggatcgagctgtggctccagatgtttctcttctcccacatctgggtctttctttttggatgtaacgattgtaagattttattattataaagtcccaacaagacctgccaacatccactgccagcactgtgtcaactccatctcacagagtcagctaagaaggctcccgcttaattaccctcaccacgagccaaggagggggaccccagggcgttttcataatcaagacacagatttcaaatcaaagtgatgatcccagccaggatcagccaaggtctctcacaaacacttggtcaaaatgagtttccaagaagttctgtcttaaattattcctatggatcgttcaagttataagtgaatatttaggctgcagttcacaaaaacctctctctttggggggaaaagaaaactggctttcatttggcagtttttgactttgtcagcatttctaatggcaagaatgacaaagtctgcttgggaaatgccggcaccgacagctgtgttttattattgaatatttctggtggtggggttggccgccactctgtttatgttgcttgtaagatttcacgcaagactctgcaaggtcgtgggcttaaaccgaagtgtctgatctgctggataattcattccatccccttcattcctaggccctttctttttatttttttttccaagtgcaaattgagtactgccagaaaatggagtccagaggcagccctgggttcccggtgcagttcccaattgcttcttttgtctgtgggggtgcaaggcggccatccctgcttgggtgaccctgtagtgtccacttctcccctgagttgcatgtctccaaggtcctggtctgtcttgacacaggcctttcagtaagtgccttcccctccctcaagccattaagtcctgctgccttctttttctgggagctccctacccagacagagagggagtgcactttgtttgccaaaatcttacttcaaaccagtcagcctgtgttgggacactaaatctagctttggaggtttgaatggaggggagggtctttcttagtattctgatattttccccttttttcttcatgaacatgaaaaagaaaacttgcaagaacagacatccagggaactgggccaccccctggccatttgtttattcatttgctttgtccacaaacttttgccaacagcttctgggtgagggtagaaatgggattcaggtatcagctgccatctccctgtgtcctaagagaagactgtttcaaaccccatttgcatgcacagtggaaatccacaactctctacttggtgtctgcagatttgggaggagagtcactctgtcacagtcacctctagtctgtcctcagggtgcattggaggtccgggtctggagtcactggccgtctgtggtctctattctttacggtgcagagtaacacgaaagattcagtcctttacgactctccgtggagccttccctagggccccctctcacctttcatcttccttaacccaagaaatcaccttctgcctcctggcaatccgtgttccacactgaaccccctgggtaggaggatggggatctgctctctcaaggtttctaagctttttcctgcagatgttttctcatctatgaaatgggatgataaacgtgctgggtttagtgagataacctcatgccaaggcgctgtcctgtgactttcatttgatgcacgggagaagcggggctgcggttgattaagtgacctccttgaggcccagggctggtgggtgaaggaatggagacagacgggacgcaactcaaatgcagccccacctcctctccccgcatggcaggatgcagcgcggaccacccacagcaaaccccatacctactctgagccaggcactgtcctgtcctaagcactctggacactcgaactcggtccttacaaagcaaggtgctgtcatccacaccctcatcttacaggtggcgacactgaggccccgacagttttgtaacatgcccaaggtcacacagtcagcaaatggcatgaccagaattaggttttgagccttaccccgctgcaccaggctgccccttagagctgagccctagtgggccaggccatgcagaccctgcttccacctgtgctcctcctccctccgctatccctccccacagaggaccacatggtcagtttccataagaaattaccttgatcataaaagacattcaactgagagcaaccatgtgaattgcctgagggcctcttggattccagatgctttttgctaattccagatggttgttttgttggtggtaaactagcatctctgggctcttggcttcagttttagagagcttgttccttccccagcccctgtcctgagtctcctctccctgaatccaggtggcagaggcacagacagccagacattttgtagcagtcagcatgagactgtggatgggacacagcaggtgtggggactgccagaattgccatcggacaagagcagcaagggctggccctgagcctgaccaaagaggcaacagtcccaagaagtctgtaacctctgaaatttgcacacttaaggacactactctgttagaccccttttctggatggggctggctttttgttttgttttgttaagtgggttagtgcagggtttctcttagatttgaacactcccgcaaaacctggggggtcgtgttaaaatgcagattttgattcagcaggtctgggtgggggcctaggatcctgcatgtctgaccagttcccagggaccgcactgggaggagtaagtggggagggatggctgacggccacgtgtggtttatgggtgcagacccagccttgggagggtggcgcttcggggtttgggaactgggctgggactggatcctccagagggcagtcggggggagattcagctttggagacagagatatgtggtgactctacccacatctgactcatcctccaggctcgggtactggagggaagggcagaggcaagggctgaggacctgaggtctggctgccaccgacagctccctcctgggggctcacagggctctgggaacaccgccctcctctaatttcactgcacaaccaagactcaccttgcacttttccttagcccagctctgccccgagattagctgatgtgggccctcccaggggcaacccgagcactcaggaggcctcaggttcagcagctgggccttaacggtgcagtccccttgtgactggcacgctccacgtgcaaccatcagcccaggagagacacaggctcatgctgaaagacattcttatttggaaataattttaaactttacaaaaaagttgacagaataagaatcatacaaagacatcataagcgctttcccagacttaccagttgttaccatcgtattgcattgccttatcatttgtatttttttcctctccttttatatctctttctcagccttcatctccccaccaaccaccctcccatgtatgtataaatttttcttagccttttaaggggctcttgacccctcaatactacagtgagaatttcctaagaaaagagacattttcctacataacacagtaccattagccacttcaggaaggaaatttaacatcggtgcagttcttagatccaacctgttacccatatttccattggctaatggcccagtaaatgtcctttatagcattttttcctccagtactggattcggtctaagaccaagtgttgtatttacttgtcaggtctttttgactccctttcgcctgaaacctttccacagtctgtcttccttcgtccgtatgccattaacatttttgaaaattacgctatccccatctatccctacttttaaacaacagaatgctcctctttctgagttgatctagtgttttctacatagttagagtcaggttaggcatcctgggcggcccatcaatatgtgatgttgtgttattttcaggatatcctacctgccctgcactggcaatgttcatcttgatcacctggccaagatattgtcggatttcttcactgtgtaattattatttgatacgggttggatctgtgtccccacccaagtctcatgttcagctgtagtccccagtgttggaggtaaggcctggtgggaggtggtcacatcacgggggtgggttgctcattaatgattcagcaccatccccttggtgctgtccttgtgatgagtgagttctcgagagagctggttgtttaaaagtgcacggcccctcccaccttgctctgtctcttgcttctgctcccaccatgtaagacacctgctccccctttgccttccactatgattagaaacttcttgagacttccccagaagcagaagccattatacttcctgtacagcctgcagaactgtgaaccagttcaacctcttttctttataaattacccagtctcaggtttttcttgacagcaatgcgagaatggactaatacacgattcttcccttcacactaacagccaatctctggagacacctctaaggccacacagtgtcagctcctccgcaaatccccaaatccttcctccatgactctggccctgaccaatcttcatgaccctggtgatgtttcccaactccagcccactcacatcctactgcaagcaaaggctcttcctcgtcctccagtcattcattcattcattcatttattatttatatggactaatggagtcctattttctccaatggtttataacttattactgttcttattttggtgcccaagttgtcccagatttggccagtgagagcctgttcaagctggctcctgtgttcttacgacacgtcttcaccattttttcttaacgcatcctcactttgggaaataacaagctatgtgaggctcatctagtgcttcctcaccctagtcctggaacaagccatttctctgaggagcctagtttcttttcatggcggatggtattagaatccgggcctgccgtgatttttgcaactgggctgtctttgcttctaggctttgtcactggactgagttaagaaatatttagtgatgtatatgcatctggacacaaatgaagttgcatatatacatatgtgcagacccatacttgtctaagtgaccatgggcatgcatagactaacatattggatacatatatctcagaagctatgcgttcacctaattcctctgtgcaaatatagagctgccctctctcattccccagctgtgcagtgtgcagtctccagctgttagctcacccaaggcccacctcagaagttgtcctcctcttggaagctctgagccaatgcctgagcaaggcagtggtacaagggctgcccatccctacccagtgcaggaccactctatgggcagtccttgccccagaactctccaccaggatgagaggcgttgtgagtctgcacatggtctggcagccgcactgtcccaccccgcatcctccactttccatcacaaaagtgctcgccaagaagccatgtatgtttctaacctcacccagtacctgcgaccctggtcccagcctgcactccaggggtctttcttgctttctttgatctgtattagatgtcccttctttcacagtgagaatccttgcacctgaaaacaacatcacccttattcaaatgcccagttctatgatacagcccaaatcactgcagaagtgctttgctcacagcaccacgaaaacatctgtgaaacagagttcagtatttgtttccaactctttcccaaaccctccgtcccagacctacgcaagaccatatttgtaagtttgtacgattagttcttgttttattttttttctttaatttctttattttatttttgcaaaaacatataagtatttattttcaatcacaatgatcatatgcggcatcatgatgcaaataaatacaatatacagtatcacagccaggcaacacatttgtatttactgctaccgtgcacctgatatactacaaggagctggcctcatctttaatccttccataaactctgcaaggtgaagacactgagacttacagagagcacatgtcttctctgagctcacaagtcaagaagtggcagacaggtaatttattttattttttattattattttactagtttggggggaacaggtgtttggttgcatgaataagttctttagtggtcatttccaagaccttggtgcagccatcacctgagcagtgtatgctgtacccaaagtatagacttttatccctcaccctcctcccacccttccccccgagtccccagagtccatgatatcattcttatgtctttgcatcctcagagcttagctcccacttgtaagtgagaatataggatgtttggttttccattcctgagttacttcacttagcataatggtctccaactccatccgaattgctgctgtgaatgccattattccattcctttctatctgagtagtattccatagtgtgtgtgtgcatatatatatatatatatatatatatatatatatatacacattgtctgtatatatatatatacacacattgtctgtatatatatatacacattgtctgtatatatatatactatgtgtgtgtgtactatatatatacactatactatgtatatacacactatactacatatatatatacacacacacactacacacacacacacacacacacacgctacattttccctatccactcgttggctgatgcacgtttgggctggtacatatttttgcaattgtgaattgtgctgctataaacctgtgtgcgcaagtgtctttttcatataatgacttcttttcctctgggtaaatgcccagtagtgggattgctagatcaaaggtagttctacttttagttctttaaggaatttccatactgttttccgtagcggttatactagtttacattctcaccagcagtgtagaagtgttcccttttcaccacaaccacaacatctgttatttttcgatttttaaattatggccattcttgcaggagtaaggtggtacctcattgtggttttaatttgcatttccctgatcattagtgacgttgagcattttttcatatgttcattggccatttgtatatcttcttttgagaattctacattcgtgtccttagcccactttttgatgggatcatttgttttttttcttgcttatttgtttgagttccttgtagattcgggatattagtagttagtcagatgtgtagtttgttaatattttctcccactctgtaggttgtttgtttcctcagctgattatttcttttgctttgctgaagctttttcttttaattaggtcccattatatttatctttgtttttgttgcagttccttttggattcttggtcatgaactccttgcctaagccaatgtctagaagagtttttctgatgttatcttctagaatttttatggtttcaggtcttagatttaagtctttgatccatcttgagttgacttttgtataaggtgagagatgaggatccagtttcattcttctacatgtgccttgccaattatcccagcaccatttgttgaataggatgccctttacccactttatgtttttatttgctttgtagatcagttggctgtaaatattctgctgtatttctgggttctttattctgttccattggtctatgtgcctatttttatactagtaccatgctgttttagtaactatagccttgtagtatagtttgaagtcaggtaatgtaatgcctccagatttgttctttttgcttagtcttgcttttgcaatgtggggacttttttggttccatatgaattttaggatttttttctagttctgtgaagaatgatgatggtattttgatggcaattgcattgaatttgtagattgcctttgccagtatggtcattctcacaatattgattctacccatccatgagcatgggatctgtttccatttgtttatgttgtctatgatctcttttctgcagtgttttgtagttttccttgtagagatcgttcacctcctgggttaggttattcctaagtttttgttgttgttgttttgtttttttgcagctgttgtaaaaaaggttgagttcttgatttgattctcagcttggtcagtgttagtttatagcagtgctactgatttgtgtacattgattttgtatcctgaaactttactgaattcatttatcagatctaggagctttttggataagtctttagggttttctaggtatacagtcatatcatcagcaaacagcaacagtttgatctcctctttactgatttggatgccctttatttctttatcttgcctgattgctctagctaaaactttttcttttttttttcagtgtgattatggtgttcacttgaaaaacattgagttcatttgttagtttcctgtcactcttgggtctttttcccctctctgaccttattgattaagttttatgtttctgaatatttaaaacattaacatgctcccaaatgtcaagacgagaccaaagggtgccctggagaggtcctcttccttgtgtatccttccaccctgtcctcttatcccatacctccaaagaatcatgtctacactttcctactttaccccctctgtgtttttctttctatgcatggtttcgtaattccccttctttcttacacaaaaggtagcatattctacattacgtgttatcttgcactttgctttttacagttagcaacatctctggaaaatcactctatattcattcatagagatcttcctcattctttcttatagctgcatagtacttactactacataccacagtgttgatgtacctcagattcttccaagtctctcctgcatgtgggtgttcgggtcatttactggattctgccattacaaacaatggtgcaatgaataagcctgtgcttatgcatttgcatataattggaggtggatctttagggtaaattcctagaagtgagattgcaggtttgaagtgcgaatgcacactgcacattgttttgtaagaggttgcccaattttccaccacagagattccaccatgcttcatgcccactaacagcacaagacagtgagggttttccatggcctccctggtgggaacggttatccagcatatgaatgttgtcactgtgatggctgaaaagtggtacgacagtgtaatttaaatccacatttcccttatttggcgtgcttcatgtttaagggccattttataactcttattgtgaattgtctgtttatgtctttggacattttccttagttttaaaatgtcctgtgtatttgaaagaatatgggccttttttttcttttctttctttcttttttttttttttttttgagacggagtcttgctctgtcacccaggctggagtgcagtggtgcgatctcggcttactgcaacctctgcctcccgggttcaagctgattctcctgcttcagcttccccagtagctggaattataggcgcttgccaccacacctggctgatttttgcattttttagtagagacggggtttctccatgttggccaggctggtctcgaactcctgacttcaggtcatccacccacctcagtctcccaaagtgtgggattacaggcgtgagccaccgagcctagcttttttttttttttttttttttttgagatggagtcttgccctgttgcccaggctggagtgcaggggcgccatctcggctcactgcaacctccacctcctaggttctagcaattcttctgcctcagcctcccgagtagctgggactacaggcacgcatcaccacacccaactaatttttgtatttttagtagagatggggtttcaccacgttggccaggctagtctcgaactcctgacctcgtgatccactggcctctgcctcccaaagtgctgggattgcaggcatgagccactgcatccagccagaatattggccttttgtctgtgatatacgttgcaaatattttctcccaattttctatttgtcctttgattttgctgatgtatttttgccatgcaaaaaaatcttgtttgagtttttttgtatcaaattatcaatcttggttttcaatcacagttagaaagtcttctttacccagagtagaggaattcacccatcacctctaatactccatagtttaatgatgacttgtggttccctgatctatgtgtggtttattcttgtgcttgggatgaggaatgcattaattttatcttttttgcaaatggctttcttgatgtcccaacacatttattacccagatcgctttagcattgggttcagttttaattccctcatgagtggccttgggggtagaggagggggcactggtatacagggcaggtgagccctaaaattggggcttaggctgggaaggtttttgactctgctcaggaaagaattcaaggatgaactggcggtgttagacagcagcttttactgaaatggcagtgtgcagcagcagaggttctgctcgctgctgagcagggctcccccataggcagtgtgcccagtgtagcagctcggggcagtgctgcagtcacatttatacacacttttaattacgtgcaaattaaggagccggttatgcagaactttctagaaagagggtggtagcttctgggttgctgccatggaaaggggcggtaacttccaagtgttgccatggtgatggtaaatggccacgtgggtggacgtgtcttatggagaggggctttcacctcgtccctgtttcagccagtcttcaatctggtccagagtctagtctccacctctcatctcaggagagcagggctgtaatgctagttccaagtgagaaatggcctggccttcaccagccaaagggcctcatccttctacctcccaggtctgctgtcggctcctctgagacctgaggatgctggaggtgcaccctgagggtggtgtgctgaaactggcttctagcgagatggcccatcatcagcattccctgaggcccggggtcccactgacctagaagtgggggctctgatcttttcactgcaaagagacagtgaaggagattggggggcaatggaggaatgtcatgagtcagtcttgggtcacctatagtcccaggccttgtacaggaccccacgaagttctgctttcaccctgattcacacctgtcatctcccacctaggggacgaaagtagtttccatctggtcccctataccactctggccttcccatggtagccagaggtatccttttaaatcaagccacatgacatctcctgctggctcaaaacccccagtgtctccttctatggtggcctggaagggacagaagcctcttcattcatcactgaggcccctaactcaaggcaagacaacgagttgggcagaagccaagttgcagaggcatctggagctccttttattgtgtacaaatgtacggctcctgtccagcattgtcagtggcctcctgggaccctgctttgctcactccctgttgccagttgggtcaagtgcgaagtccttagctcagtcccacttctgcgctgctcaaattgcttcactattccctgctcatttccccccaggccctgcccctcttcgtccaaccctacaatcctgccagacttcaaggctcttgctggctattcagcccacacccaccctactgggccctgatccccatggaggttggagctcaccagtgaaaccaaaatcactccagatattcacaacaaagggagtttagcacagggaaccagggcacggaagtggaggagctcgaacctgacagggatggcaagaagccccagtgggtggcagctcagggagcccctgctgtggcttgtgggaggcgggaagggaggaggagggcgtgggagggggaagtcaggtgttcccatgggtggcatctcagcagaagctgcatctcctctgtgacctggtgcagtggccgcctgtcactgggtgagacttgtccaccgtaacagcaatacttcctcaatcctcatgccttagtttgaattccctgtgctcagcgcaactttctttgggtcctgtgttagtttctgcagagaaacagaacagaagacatatatttacatgcatataaatttatttattataccggattggctcacacaattatagaggctgagtcgtcccaggatctgcaactggcaagctggagactcaggaacgctcagggtgtaagttccagtctgaggacagaggaagaatccatgtcccagctcaaacaggcaagcaggtcaaatcccctcgagtcagattttttgctccattcagttcctcaactgattgaaagaggctgagccatacaagagaggtaacagcttgactcagtccacagattcaaatgttaatctcatccagaaacactctcacagacacacctggaagaatgttttgttttattttgttttttgagacaaggtcttactgtcgcccaggctgcagtgcagtggcatgaacttcaagactcaagaaatctgcccagttcagcctcccaaagcactaggattacaggcatgagccgctgcacctggactggaatactgtttgaccaaatatctggatacctggtggctgagtcaagtagacacataaaattaacattgcagccctcagggggcatggagttccccagggtacattctcccttgtggcgttgatcagctccataattaaataatcacactggcagccagggaggtggcagagcatccctcctggacctcgtttgagctctgtgaggatgggacccttgctgggctcattcaccaaggcttcctctgtgcctggcggagcatccagggtgtcacaggtgcctttaaatgtgaggagcagcaggcaatgcaggccgcatggtcactcgcccttgcaaagtcaggggagagaagcaagcttcgagcaagtctcagaggtgaggaggggaggggctgagggcaggcagtgctggggagctgattctttccctctggttacggaagagactccaaatctcatggcaacgcggaaggcgcaaggacaaggccaggaccctccatccctgcacaccctccgtccactggtgtctttgggacatcttgacccacaacgcctcccagcacccaccaggactctttctgccttctgaatgataaaacccaataaaccataaagaaaataattatggatgaaaagcaagaagcctgtttcccagcggggtcctgccatgccgggatcctgcccagagccacactttatgaccaagtcataaacacatggaaagggagattttaatgaaaaagagtccactccagcacctctggggagaagctggggggctgcatttcagtcaccggcccctgcctgacacccccagccctgcgtacttgctcccctggcttctctggccgtggaatgtgtaataaataaaaagcaaatcacaccctggttccttgtcttgcctctgtgtctgtctctccagcacacactcctacaaaagctgatgggcaatgactctggcccctggcgtccccaaggtaggacactggttacctctgagaccctgagggcagtggccctgtgcccagcacagccacctcctctctggagttcccccatccacctccctgacatccatctgccctgggaaacagggtccccaaaggttccaacaactgtccccacttgccctctgtcctctgctggattatagagtggccgagaggtgagtgcagctcccactgagaggctctgagctcattatccaggagcagaggcggtttctctccctgctggtttccagctgccatctgtcacgggcaggcaatccagaacgtgttggccgaggctgctgcagcccatggtgttcagcagagaaaccatgggtctttcaatcggatattccaaatacaagctctgtgaatggctgttacctgtgcttacacgtccacgtgtctgttccagtgcgtacatgcatgcgtgtgcatgagcagaggtgggcgtgccaagtgtgtgtgtatgcacagctgcgcatgagtaagggtattcacatgcatgactgagggtgtgccatgggtgagcacatggcacaaatgtgagctagaggatggctgtacagtgatgggctgcgtccacctatatgggtgaccaagcgccttccgaggagaggctgggacgagaaatgttccatgagcctcagtgtggtggggcttttactagattttatttcctttccattctgaggctgaagggggtttttaaatccaggttgcagcttgggcttggagaaatatagagatgagataattaacaaaacagtcacccatccacaagaagcagggccactcttggcaccttttaggatggagagataatggattggaactctttccagaccctgattcgtgtgatcggggcctaggggagatgtgagggaaaagggtcagctaagagaaagctcgcagagagaggtgggggttccactcgcagcccgccctcaaccagaaagggacagagcctcggaaaatccctggaggggacctccgcacagagtgtgggagctcgtggggcagtcttatttgcagccctcaagagctgtgctgctgacggcgaggcagctttggtctgtgtggtccagggttggatatgactggaacccacatggggacagaatcatccttacagaaactcagtcacctggaattgggtctgaaacaaggtatgggaaagaggcaaacaaggaaggaaggaagaagaagtgagggagggaaggaggaagggaggaagggaaggaaggaagggaaggaagggaggagggaaggaaggaagagggaacaagaaaggaggaaggaaggaagaaagaaggagggagggaaggagaaaggaaggaagaagggaaggaggaaggaagaaggagggagggaaggaagaaagaaggagggagggaaggaggaaggaaggagggagggaagggggaaggaacaaagggaggaagggaaggaagggaggaaggaaggaagaaggagggagggaaggaggaaagaagaaggagggggaaggaggaaggaaggaagaaggaggaaggaaggaggaaggacatatgggagaaagaaaatgagggaggaaagaagtggtgcagggagaggaaactgtaggtagatgataggccttccccgtgaggtagtgaaaagcccattgttggaaagattcaagcaaagggtttttagggaaggctttcaagtgtcagacaggaggttgggctaagaccatcaggaagcccgattccagcctgtctcaatattcttcttaaaggcatcattttatcactaatggatacaattgattcagtccatgccgggtccgtgctcagcactcttgtgcattattttatttaatcctctcagcaaccttataagggaggtattattattattattgccttcatttcatagtgaggcccagcctggttaaatcactttcctgggtcgcccatggccaggctcaccgggtccccaagtccatgtgtactgtgatccccacacccagaggcacagctaccaccattcacaaccaggggcaggcccaccccttgcctataatcttcttggataagggacatcacactgtacagaccccggggagcccggcggtgaagctcctggtatcctgggtgtctgaagacaaaggtggttgaacagagcaaccctgaactgtttctgggacatccacaagctaaagcagcctgatggtgagagccaccttttctcctgggcaggcaggaaaggcccacaagacacatgaaaagtgagggatgcttgaatccacaagcccatgggtcttcattaccatcgtaggccgctggacagagggggcgtggtttcctgaggggtgggcttccagccccagctgccagctgtgaacttggaagcctcactgtggacacccgatgtggactcacacctgaacacattcctgacacctgccccagccctgggggtcagcatctccacccagagaatcttccttctggaccctcaatctcccttcaggaccctaaatcttttggggggccctaaatctttcttcagaaccctaaatcttccctcagggccctaaatcttccttcaagaccctaaatcttcttggaggccctaaatcttcctttggggacctaaatcttcctccgaggccctaaatcttccttcatgtacctaaatcttccttcagggccccaggcattgccctcctgccaatacatccttcccacctcagaagatctgggttttcgggggacaccctggggtaaaaagttgaactgtcgggcaagtctggccagtcctggtgctggcttcccttcattcagcccttgtggagccctagaggaggccctgttactgagtcagcaatgaagtcccagttggcactgtttggtgcaagggcctgtggcgctgtgatgggcggatggtgacgtcctgctggctgtgccccatatgccggactccagctcacactggcatgggcagtacaggcaggatgctgcccagctcccttagcacctttggaatttccaagtagaaagctctggatttgttcagccggagcccctgcaaagccttccttttgtttgtgccaaccagctgaatccgtgaggttggctctcctctatctgctcgcattcaaggtcagcaaaggccatgttttgtggttaaaggaccccagcaaggcctcgggagcactagccctcgctgctctgcaaagctggaggccgatgaggaatgttctctcctttgaatcacgttttcttggttggaagatgaaagaaccgttgatatctgagttaggattttgccagggcaggcacaggccaggttgcagagttcatggaatgagcagcaggtgccaaggctgaccccttacccagctctcccctgacttgcctccgttgtccgagggctagagacctgcgggctagagatgggcctcatggcaagcagccaggcaggaacagacaccctcaccaacaggcaggaagcagtggcaaatgccccacctgttcctctgtgggtcacctggagatggcccagcgcaggtctccaaaggcccccggtggatggggccccacaggcccacagccaaccagcccaggaagcacccttccttcagctctctcctttctctatgcatctttctcctctccctgggttaccttcctaaaactatctgcacccaagccttgactcgcgctctgctttcaggggaactcaaactaagacctctgcctccctacagtgggtttctcagctgcagaactgttgacactggggctgggtaactctgttggcggctgccctgtacaatacaggaccctgacctccccccacccagatgccagtagcagtccccactatttgggacgactgaaatgtctccggacattggcaaatgcctcctgggggcaaaatcactgtggtagagaaacactaccttagaagaaccagacactcaaaggccaggcggtcacatgaagaagccaggaggcccagggagtgttggggactgtgggagacgaggaggacacctcgagtttctcaccccccagggcagccaccactctgcctgctgccaccttgccaggatgcggtcccggggctgtctgatcccaccccacccaaattctattttcgaaagaagccggagactgcgggttaatgtgattgtttgtttctgattttgaaaactgagctggcacacacacacacaaacacacacgcacacacatctgaggaccagctttggccctcagcccaggggaccttgccccactacaagtgcccaactccggactctgaccccaggcttctggcatcaggccttcctctctcagggagccaggcccgtcggggcatgggacaggcaaatctctttcttcttcttggggcatttccagggatctcccaagagctccgaggcctggtgaccctagagcatggagagctggagaaatgttggaaaaccctgtcccgggaagctcgggctgcatccaggaatgtggccgtgagctgggcctccccactggccccaggagggctgtcagtgtcctgtagaccttgggggagtcttcacaccaagtccttagctccttacacagaatctgtctcatggcttattgggtcaacccagtccctagtaagctaaaatccaaccagagcctaagggccaaattgcattaaaaatgtgagcaaagccctttctccaggctccatctcccttacctgctcccaccctctaccactctgccccgacaggccgctgccccagagactgcagttagaaaacctgaattcaaacaatgacttgcaccagctcgctttgactttggcaagcctctgaaacctctgttgtttcttcattgaggaggtcaagggcagcattgcttgagcacctattgtgtacctagtactgtgcttagtgtttgacaatgttctttcattttacctgccagagcacgggctccccaaaggccaggaacgagtctggtttctggaacagcactgtctcctcagcacctagacctgggcacatagcagacaaccaaggaatgcccatcaacgagaggaggcctcacctcatggcggccatgtggggcaggaatgactgtaatcccccctaaccaatggaacagctaagactcagagagggtgagtgtctttcccaaggtcacacagctagtaggtaggtgagctaggacttccagccccggactgcatgccttttggctatgtcaccttagccactcttccctgccactactgcctcccaggtttgctggaggatcacatgctgagctgctcacatgctgagctgttcacctgctgagcaagcaagcatcaaacgcccatggaatacaaggttctagggacctagaactagaaagacattccttttctgctagtctgtggctcttccagggtagagatggagcaccacacctggtgaagagcgcggacttgcaggcttaccagaatttgcctgtgtatgagtttcttcttgccattgtaacaactgaccacgacttagcttaaagcaacacacatttcctcttttacggttctggaagtctgaaatggagtctcatcgggctaaaattgtgttggcagggctgtgttccttctgaggctctaagggagaaatccgtttcctcgtcttttccagcttctagagtttgcttgtactacttgcctcatggcccctcctctatctccaaatccagcaagctcatcactccaacctctgctgccattccgatgtctctctctgacattgacctcctggcccaccacttcccttattaggatccctgtgattacactgtactcacccagataatccaggagagtctccccctccagctccttaccctaattacacctgcaaggccccctttgccttaaaaggtggcatagttacagttttgggggtcagaatgcagacatctttggggatggtcttagtgcacttactttgctataaaagaatacctgaaggcaggtaatttataaagaaaagagctttattaggcttatagttccacggctgtacaagaagcatggcaccagcatccgcttctggggaggccacaagctgcttctactcatggcagaaagggaaggagagctgatgtgtgcagaaatcacacaatgactgagtgcagcaattctccacccaaccaatggaaaagcgagagagagacagggagagacagtgagcagtaacaatgggtggaggtggtcctacactcttttcaacaactagtgctcacggggactaacagagcagagctctctcctcgaagaagggcattgccctcatgacccaaagaccttccaccaggccccacctccaacaccacggatcagatttcaatacgagacttggggacaaactagccatgtccaaaccacagctgggaccatgactcctcccagcacatcgagtttgtggggttgtattatcagaattgcaatatggcttagttggctcaggctgccataaaagaatgccataggctgggtggcttaaaccacagaaatgcattttttcatggttctggaggctggaagtccgagatcagggtgccagcgtggcagggttctggtgaggaccctcttcctggtttgcatattgctgccccctcgctgtggctcatgtgacctttcctgggtctgtgcttaacgtgagagcaaggtctccaccaccaaggccaccagccctatcagatgaggacctcacccttatgagctcactgaactttacctccaaaaagttcagtcttaacacacggttagattggggttagggctttaatatagaaattttggggggacacatttctgtctcgagcacagaacacaggagactgctggctcccacaccctccctttctcttcccctgagaaccacgtttcccaggccacccttcctcccactcgtttccctctgtgctctgccaaggggaggccccagaggaaggttgaggggagggagggaggagacacccaggtgtgtccccctctttcagtcggcagtgggtgagtctcctctgtggctccagctccccataggcagcctcagctcacagctgggggctcagacaacacagttcctccctttgtcctgctagcccaggggcagtggggacttcctgctgttgctcatctgtgttgctctcactgccctggggcttggctttccagctcttctgccacctttatatggagattttggcatgcacgtccatcattggactccatttttctgtctgggtcttgactaagacttcccttcacccacagggcctcgagcccttcacagggtccctcaagtgttggggcaggggcttcaggtgttggtcctcctcctgcctggcatcctctgccccgccttggcaacgtcagtagctgcagaacatctgcgtctactcctctgcccatcctgggtctgtgctgagggccctggggtgcagcaagctgctaagcctgcagccaaacctgggtccctctctactctcttttgtgctattctgtgttttctaaatggtttgacaaatagtgtcattgtttttacgcaagaaacaccaatagaatctttaattcaaaaaaaaaatcagggctttcctctaacacaatgtaacttctttctttttttttttttttttttgagacagggtcatgctctgtcacaaaaaaaaatctcgactctttttttgatggagctggagcgcaatcttgtctcactgcagcctcaacctcctgggtccagcgatcctcctacctcagcctcccgagtagctgggactacagccatgtgtcaccatgcccggctaattttcttttcctttttttgtagagatggggactcactttgttgccctggctgatctcaaactcctggcttcaagtgatcctcctgcctcagcctcccaaagtgctgggattataggtgtgatctaccgtgtccagccctgatagaactttctgtgctcatgacactgttctttctgtatatattgtccaggacagcagccaccaggcgcaggtggctatggaatacttgaaacatctatgatggaggaactgaattttaaattttatttcatttcaatgcatttaaatttaaatagccacaagtactggttaccacagctttagactttggtaagattcctggagcccttgtagtgggactaacaaagactgtctctatgtcctaggatttctctccagcaatttcacacccgtatgaaagtgtcttgtacacatccccctacccccaaatcatcattcaacaggttatcattgtgtccagccttgtgtgaggggcataaggtgagtcggagggaagcagaaatggagggcacagaataaatgtctggaggtctcagggtggcagaccaagggtccctgggctggcgtgctgggctgtgatgcattggtgacttcagggcagaccggctttgtggagagtagggaactcacacccactccatcactccctcttgtcttcctcccctagctcataatacagcagatttaattcaaggtcttttacaaatccttgaatgacacagtcaggaaaatatacagaagtcaacatgaagttttaattttccacacaaataaatctgcctgtacagcccacactggagcaggtttagagccaggccctcagacaggtgcagagatgctaggagatgctttgctggaagaggaacctttgctttcctctgctgacatctccaaatcccagtcccaggcagtgccagtgcatagggacctcagcatgggcatccacttcctggagagcacagtgaagggaaaacttcctaaatgcccaggcctctcctccctcccgtatttatgacaagctaaccatctgacaattccttatagagctgggtccctgagtcctaaattctgaccaaggtgtgagtttggcagaaggctgtggagagattggctggagtctcagtgacaggctggaagccagcaaggtgcttaagggtcctcacatttcattctccaaacctcctgctcctccaacagagacattttgccctcttaaaagaaaagaaagttgatgtgcagagaagtaaagaaacttgcccaaggtgtcaccacaaatgagcagaggggctggggttctagaggattctggaagattctagaagattctggaagaggattctggaatatgggttggttctattcactatactcagcacacatcctcccaggagacaaataccagcaccacaggagtggctaaaagagaggattaagggcacagaaaggagagaaggtagggtagagtgggggaagagctctaagtgattcattgcatggtttacctaaccacagattaaccacaagcaaccatttcagccccagcagtaatgctggtcagtttctgaattgcacgcctgtactatgtagggcttttctcccactggttcttttaaatttgcagcttcccaatgatgaagttgttaccatccctgtctacaggtaaagaaacaggctgagaggtcaaatgatttgcccaaggtcatgtggctggggaggggaagaacggggccttgatcccaggggtccaaagctgatggttttcactagcacacaactgcctttcctaggtggccagagcagaaggaaatcaagccggaccagagtagccccttcttgctccacagaaccacagccttgccaggtcccaaggcatttggcctgtcctgacagtgatgggatctcccaaaatacagccccctcagagaccatcagaactcagtccaaatggggcctggaaggattctcctgatgttaaaatacctcgttcaccccacagcctccgtcgttgctctgggacctcgttgctgaccctggatgacagaccactgcctaggatgaaattcccctctggatggatggcttctggtttggtgatggaatggattccagggcctctgaggaaggcaggaagccttgggacttggcaatctccacaggagatggggtgtgtgctaggtgaggcccccatcaccaggagcaaggcctggtccaccctgagacccagcgcccacttactgtccatgccttcaccttgctaagttagtgtgtggtccacttgctaagagaaacaacaggtattaagggtttaagaaaaaatgaaacccaaaacaagctctgaagttctgtagaccttggccaactctcagcacagccacttacttgctagctaatcttgagcacgtcccttaacttctctaacctttttcctccattcgtaaaactgggaaaatttgcatctttttcgtgcattcgttttgagaaatagatggatatgtgtgtgcctgtcagctcgacgctgggtgcagagtgagtgcgctaagcacggtggcttccttgactgtagagatgcatcctagctcctgcctggtctgtcccaggtggacagaggtgatggcatctggaggggtcccacctccaatgtcttaatccagggcctttctgtggcatagtgctgagccagcgtactgaaaggccacagagaggtgcagcaggtggcgagttgagcccccacctccccaaccccagtgattttccctgaaaagacaccccatgctttgttttgttgtctggcttatgtaaacttgcctcttgttttatagttgcttccccagctttaaactaaaggctgttattgacagcctatagttgcttccccaacggccaatccctccagctcccctcctgcttccaggcaaacaaccccagtcataagggcctgcgatgttcccagtcccagggaatgagtcctgattggtctaagacagctaagacaattcttttctactttatcaaatacagatgacccctgaacagcaccagtttgaactggggggtccacttatatgtggagtttctctctctgccacctctgggacagcaagaccaatgcctcctccccctcctcctcctgagcctactcactgtgagtaggatgaagacctttaggatgatccatttccacttaatcaatagcagatatattttctcttccttatgagtcttttaacaacattttcttttctctagcttattttattgtaagaatacggtgttgaatgcatataacgtgcaaatacatgttaatcaactgtttatgttacgggtatggcttctggccaacagtaagctattaatagttaagttttggggaagtcaaaagttatatgcaattttttgactgcacagggagtcagcacccctcactcctcattgttcagggtcaactgtacttggtttccaagcctcccttataagtcggtatggccatgggacccagttttagatgtgagaagagaagaagggttgcatctgggaaggatttctttctggatgaaagatagtcttttgaggagcggctccttggtccctgccctgtccctcctgctggagatgctgcatgcaagggcctgatgtctggaattgaagcatccatgtggtgaccatgagacaagaagcatgacaataaaatttcactgggtggaagaatgaggaagtctggattcttgatgatactgttgccgtctgaacatgccctgtgaccctgtacttctgggcatctggttacatgagcaataaatattcttacggctaaaaccagtgtttgtcagttttctgttgcttgcaatcaaaagcgttcttcacataggcccccgaagagtgcgttcatgagaattagagcaaagagagaatcctgaagccttgctgagctatgggctctgaggtagttgctgggggagagaggctaggagaggaggcaaaaagaatttttcagaagtgcccgggggtgggggtgttgtgatttggatccctttaatctcctttgaaaatgcaagtagaaattggaagtacatttcatttccttttgattatttagctgtctttctttgaggagcagaggctgagccttatgcagcatagaaatgatctgggctacacttgcaatcgcaatttgagttctgaaaattatcagagattaaaaaggagatagaatcaaaagaagctgacatgatgatagctacgtgccttgagttctcatttggaataacctagagaggatcaaacaagttcattgccaaagggactggggaatggggctgatgtcaaagcataagattcaaaaatgtcgaaaacagaattctcatctaagcacacggtgagtacatgccaagattgctttattcattaatgaaggaaccagcataatgacaaagctgactcaaaagaggatggagagaactgaggaaatgttcagtacaaagctggtttgtctcctgcgtccttcagagccaaaacaatttgtaaactcaggttatcttttctatcggatgttaatcatttgcatctcttcttgacacgccatcatttcctacttaccaatctcccacaagtcagcctttaacttttcagagcctgggctctgatcaatagtaatggttagaaaacaaagttacaccagaaagtcagataacttttattcaggcttgttagacaacgttctagtatgattcgggaagctcttcacatggtaatcttttccccttatttccaagcttgaataatttccctgaacaccacaaagggaaaatacataggtggtgctctgtatcttatcaagctttgaggtctgacatcttactcttcatgcttatacacatgcatgtgcactcaagcacacacacacacacacacacacacgatgcatgcatgcatctggtagaaaatccttctttggatgaaaggttaaccctattaaaagccgggcccctctttacctgggtgccgtgttcctctttacctgggtgccgtgttgcccagctgatcccactagtcacatttgttgctacaatcaaaattcaacaaaaaggtatttggacatttgcttgtgtctctcaaagaacaccaggagatgcagttcctaaccaacaacatcacttatcaaaactacatccaccttctgcaagctctccaggagctcaaacttgctgcctgtggagttttcttcttcctcctggcctcccttctaccaagtctttgttatttttacagacaaacttggcttctctgggcaactccttctctcttccctcctgcctttctaatctgatttctgcatcacaaaattctgggaagtgattggtgaggggtagtccttgcccagggcaccgggtcaggagctgggtttggagggggcactatcacccactagcaaatcagacttatttcatggcatgtctgggacaccacgcccaagagagctcaggtggaaagagaccagctgcatgcaccctctctctctctctctctctcttttttgcacacatatttattatgcagttgatgcagcttatgtctgggacctctcacctgtacagcctcttccaaggccctggaagggctctaacaattttgtgttcataattttgtattcttttattcagtgaaggctttcaaattgtatagcctttggggccgggcacaatggctcaagcctgtaatctcagcactttgggaggccgaggagggcagatcacctgaggtcaggagttcgagaccaccctggtcaacatggcaaaaccccgtctctactaaaaatacaaaaattagccaggcatggtggcagatgcctgtaatcccagctacttgggtggctggggcagaagaatcacttgaatctgggaggtggagtttgcagtgagccaagaccgcgccattgcactccagcctgggcgacaagagggaaactcccttctcaaaaaaaaaaaatttataatctttgagccccccagaacctgcatccaccccactccttccccaatcatagaactaaaagagctcacatgataggaggcatttatggtgtcctctccggccacagtgtcacgcgggcttgattgccacaccttccgtggctcgccttgctcgagtgagtgtgacctgccttcacctgtggtctctgtctaccaggccatgtccgccatgtccccatcactgttggggacctagtcataatccagtggtttccagcctcttggagaatcttccttttccctctgataactgagaggtgagaaaagctggcccatagtcccggggagggcagtggggctgaggcagaacctaaatgacatgacatcttcattatttggggcctgccctttggcctccactcccggtcccaccgcccacaaggagctgtgggatctgagctaattggctccgtcactggcctgaatccccctctgtctcccaagcccctgggcctctgtcgctcactgaatcagggaacggggcttatctttaaagaacagatggggaagttctcattttttattaaagccatccagtctgcataggaaagtaatctgctggcagctgcgagaatcgctattttaaatacatttgcatagcgcctcagctgcccagtggggctgggtttgcttttcccgcccccggtctcctatcttggaacaaggccaagtgcggtgtcctgcaagtagccagggcagcctcctttactgcagtgggaatggtgggggagctagactctgggtgcatggaggggacagagagccagccacccctgtctttgcccatgtttcttggcctgccgttgtcagtgttcccctggcatgaacaccaggacccccagggccagtacgggcacttatagatgctcaatgtcagctggatggaatcttgggagcttggggaaaatcagtgcttccttttcaagcccctctcctcgtccactgcttatccaaggactgtctgtgttctcattcattcattcacttattcattcattccttatttctacaagccacctttgaacaccaccatttcaggtgctattctggatggggatggtgcagtgaagagatgaacaaggttcccgccctgcaggagctcaccttctggtgtggaggaagcaggagaggtggcagacaggagcacgcgcagagagaaggccatctcagagaggcctgagggcagcagggctggacggcgggcaaaacctcagctgctgggctcagggggcgaggatcgaagttagagtggtcctcactgatgaaggacacatgcgcctgagatgtgaaggggcttctgcagatcaagggaccccaaggtcctgttgtcttcaaataagaggcctgccctgccctctaggccagcggttctcactcagcacatctggagacatttcagttgtcaccacttggaggggagatgctactggcattcagtggggagaagccagggaagctgctaaaacgccctgcagtgcagcaggcaaccccccacaacagaaaattactgggctcagatgtccacagtgccaaggtttggaaaacccactccagtggaaagatgaatgtaccagaatgttccagaaacacagatgcaattcatatcacctggagactgtctggctttgtgaccagggtaagccacttgcctgccaaggacctgcccccttcctccacctatgagacaggctaactcccccacagctttctacccgggtagtgtttccagggcaaacaaggcacagagctcttacaggaaagaggcttcataaataaaggctcagtcttatttcactgcctaaaaaatccatggaggaaaaaaaaatcaccttaggcctgaggctgaaagagctgcctcatttctttctggaaataatcttctcttaaaccccagccaggcagctgggctctaagcatcctgcccttcaaggtcagattggtttgaacgtgactgtgtctcttcttcaaagcgttggttcctggagcgctgggccttttcccgaggctctcagaacaacgagggcgattcaggggatacctggacaggtaaccgccttggaagagcgctggttttctgctctcaaaaggatctgaaaaggctcctgtcgggcatctctccctaatttatttggcagtttccccctggcttgctaggttattatctgaaggacgttcttgaaagctcaagacaataatgagtctcccagccaaccctcacgtttgctaacccagtgctcaagggctattggcctcctgcgaggtgcagctcatgcctggagagactgaaactttcatgcaacataaggaaattattagagctcaaagactgtggaactcttttgtcccatctggaacaccctattgatattcgtacatgtataaattatgtattggacaagatcctgtgctcaatggtggccccaaggatgaatggaggaagagaaataagccatgcattcacttccccttaaccctttgttcccttgagtggttgagtggacttccacccgggcaatgccacctgcattcatggcgcccctttggggcaggaaatgcccacattctttccagggtttctgttgagaattccaatcctcaccttattcactgactcctgtattctccccctatttagcctttgcatattgggaatgattaaatggggaaagggctcagggctctgtcgctgggatcagaaggccttggcttgagtctcactctgccacttgttggctgtgtgtcctgggcaggttatccacctctctgggcctgagttagattgtctgggaagtgagtatacaatggcacctccctcattgcagtgctggtgtgacagccatgtgagatggaaatctctccacacagtcagcacctggcacctgggaagtgcaaagtggatggaggagaccctgagtgtgaatatgaacaaaggtggtcctggcccacagccaggactgaagcctgctctgggctacaaggggttgcaaggctggtgtctccagggcgaggctggcagaatttgccaaagggatgtgcccagctaagggacagccaaaccggccttgcgcctgctgaatgcagaccccaaatagccttgcttctcaaaaaagggaaggaaattagatttttttgtgaaactgacttaggaggtcttggccacagtccctcagtagggacttaaaggagcctccagggtcaaagcagagaggaggccagtaaggtctggggagggagatgccatgagtgtggacaaggacgctgacatgtggctccttgcagtggttttcaccacccattggaagacggaacagttgtcagatgtgtcatctagaagcatgctctctccttcttgggcagttaggattggaggattcagccagggtttctcaccttggctgaatgttggaatcacttggaagtactaaaattcccgattcctgaaacccagggattcttactgaattgttctgtgattggtgggaagttgcagagctcccggatgatgccagagggtagcccaggtgagagccactgacttaaggcagggccatggtgagatggcctagggctcagcctgatgcctgggaataacagagaggagaacagaggataataacaaaatgaccacacaacaacacatggtcatcgctcattctgagctcagtgtgcattatctcatttaattccataccagttttatgagaaagattcagttaatatccccatttcacagatggggaaactgaggtgtggcttatgtaacttgcccaaggcccatggtaagcagcagactcagaatctaaaaccaggctatctggcaagttctacaaagccctggaaacttgaggagagggagaggtagaggattcttggaactattgcctgaagaatggagatgctgaagtgtgaactgttggttctcccttcctccgtgaactccattgaaaacctggactctgatagcacctgaaaggctgggtatgtcttgtctttctttccatgcattctttcccaaacaggggatgctcaggagatatttgttaaatagacaagggaaggtggagagagaagaagaggaaggaaggaaggaaggaaggaaggaaggaaggaaggaaggaaggaaggaaggaaggaaggaaggaaggagacaagaaggatttagggtcatcttatttttattatttctagatagtgaaatatgactgctaagtacccatgagtttgttgggagtttttttttgtcgttattttttaaaagtttttttattgatacataataatgatacatatttattgggtatatgtgatattttgatacatacatgaatcacagaacacacgggtaggcaactagttctatgaagcgggtttataactcacagatgggcagggaggggccacagagcctgggattcatcgtgagtcaggactcacgatgctcagaagctacccaggctcagaaagctacccagggaagacggagtctcgactgtgcatgccccatttgctctgcaggagagagacccagaaagcagcctgcccttggttttataccctgggggaaatgtgacccactgagctacagcaatgaaggacatcccatttctaggggtaatctggaaccgagcctgggctgctctggccagctcctccctctctcaggatattgcagtcctagaacattctacagttattcttgagaacgacaagtgagaagaagtggaaaactgggtgtctccaaggccaaccagagaactgtcctgttaccactagtgacctaacattcagaaggtgctaactttatgtggcattttaccgtgggcatgaaaggagaccccgtgcggcacataccacactcactgtgggtactctcactaggaccccgcacttttccgtggtaccctctggtccacagaagctctgtcagcaggcccatcaaaatatgcaagagcagcagcaccagtctacagacaagggaatacatggtcctgggctgggaggatggagattcgaaatgtattccagagaggcatttcatttcagttggctgatgaattgataaccatgaatactttatgtctctctctgggctgtgtagaaagcatgccatgcctggactagacggtgaagctgaactgaggatccaagcggcctgggaggcagagctccaacctctcccacccacttcctccctctcccaaggctcgggctggttcctggcaccatctgcttccaagggtcacggcactttgaaatcataaaaggccagaaaaacaagtgatccgcttagttggggccttagtgttggtggctggatttagaaatagccttccccggtgtcctggactagaaaggagtggtccccaagtgaagggcaacagaaaaggacagaaacccagaaagagcctgaagactctggaggagaaactgaggcccagggagcactggagcttacccaagctcactcaggaagccagggcaaggctgggcatcgcccacgtctcctgacggcattatcccttgacctcattcattcactcattcgcccattcagcatggtaacagtatagccaagggattgaaaggcatagattctggagccaatctgcctggatgtgattccgggtccgctgcctcctggctgtgcgtccttgggcaagttaacctctctgtcccagtttccttgtcagtaaaatgtgcataaaaaatagccctccacagacttgtaaagagtcaatgagacaatgtacatatggaaattacttagaatagcccagcacataaataaatgctcaatacctatgcactattaacaccaattaaatagatgctataaacaccaacactcagggccatgccagcagtgcaggagtgaagaggcagatacggttcctgccctcaggaatcttagactccagcaagaggaggcaggaatccaggtgcttggcctggttgggaaggttgggggtctcctaaaagggatgaaagcctgcacaggccctggagtcagccaggcaggaaggctgggctggttggagaaagtgggtgctctgtcaagaccctaagcaggaatgacaagccagtgagagacccgtggaaatcctgggtggaggtgtctgcagagcccattcgtgcagggccatgggtagatgtggaggtctgctaccctccatcttagagcagcaggggccagggagtctgtgggagtgggcacagcatgatcagacgcgccttgtgccaggatctttctggctgctgtgggagcacaggttgtacggtgcaggaccagagctgggagaccggggaggccatgggtagtccagtggtagacagtggccagaccaggcagggacagggtaatggactcatgtggacagatactgcagagaatttggaggtcgccttgcaggaggtaaatgagagacaggaggggacaggagggaccctgggctctggcatgagcagtggagtgaccagcacctttttctgcactcaggagagctgggaacgtcggtcgcagcttggaattggttaatggagaccatgtgcatgggcagggtggacgggcagaggccaggctttccttcgcagctgcagagctggtcagaataggaggggtggtcccagggtgggcccattacccagcctctccaactaggagggaagcacaaggacccaagtgaggctctccttgctttgcccagagcaatgggtcagggatgggtgctccccacgacccagcagctcccacctggcagatgaaccagaccctgtgattgcccctttcgacattgcttacaaagtcaggttgcttttcatctcctctcatctttaaaagagcacttccaggttaaaacaccggcatccacacccctgcccttcctctgcccctctagactctctgagggaggactacatctcagcctctccctcatggccctccaggtagggatggatgcagctgtccctctgccacctcactgtgtacaaccattagaaagtgtgccatcatccctctgcagaggtgaactgagcaccagctatgtcccaggcaggggtccccatgctggggatgctgcagtgaactgacggcatctgtgagcctttatctggctatattctgatctcagcccttgtctctccagcatagcctgtagacaacggggactgagcctggagatgggctgaattctgcattcctctcagctccttggcagctttctatttaacacagatgtttccgaaaaagcactgaattcattcaagaagctctgctctcaatcccagccacttgaccttgagaaagactcacttcagctttcttgtgcctcagtttcctcatcagcaaaatgagataatcacagcaccacctcatgggtctgcatgggagagcacgaatatctatgtaggagcctggaggccagtgggcatgcactggaccatctgtgtgtgaagatctgtgcttgttcaatggaggctcctgtcctggattccgtgtgaaatgtgcccattcaaatcccacatcattcccccaccctcccacgtctttgtcaccatgaagcattgagagatggccaaccatgttttgcagcaaactgtgaggtctttacccagaggagctagtccctagtctcctggttcatgccccagctttcgttcttgaaattactttccctaaggccaaagcaacagggccagtgtcttagtccatattctgttgcttataacagggtacctgaaactgggtaattaataaaggaaaggaacttatttcttacccttatggaggctgagaagtttcaggtaaagggtccacatctgttgagggcctttttgctggtgggggctctgcagattcccgaggtggcccagggcatcccatgatgagggggctgagtgtcctagctaggtttcctctacttcttcctatgaagccaccagttccactcccataataacccattaacccattaatccatgagtggattacttcattcttgagggtggagcctgcctgacccaatcacctcttaaaggcaccacctttcaatatggccacataagggattaagtttcaacataagttttggaggggacaaatattcaaaccacagcaggcagatttggtgggagggggttggggaaggcatgtctaattcgtagccactccccggtcatgcttggctgtagcagcaaaggccatgggaagggcagggtcaatggctccagttgcaagcaaggcacagcatcaggccctcctcacttctcctgtctcacccactccaaggtagagagactaagggttaaataaattgaggctggcctctatcccccttccattccttctttctgctcttcttttcagatgtccaccttcctctcagttgactgtgagctttagtggaggccaacaccatcccaggtggggtctcagaaccactgccagcggttggtttaagggtagacctatgatgtgattctggtcaatggaacttgaaagcaagtgtcctgggggtttctaggaagcatttcttttcttaaaagaagacacgtaggaagagactgtggcatcctctgttggacagtgttgcatgggcaagaagcagccatcttggtgccatgaggagccaaggcctgggacaaagacagctcccaaagaaagaggcaaagaacctgggtctctggtgacacagctgggtctttcttttttaaccaatcctggaggaggtcctcaggatttcttattaggtaagataataaacatcttataatttaaaccaacaaacttaggattttctgttacttttagctaaaagcttctaaagccataaggaggcctggcccaggccctaatgacctatattcacatcccagcccagcgagaatcaggacttgattttggcccagtccctccattctctaggactgcagaagcagaggtcagatgtgctggcccctttggtggctatcatccttcaagatgggatggtatccctgggaggagggacagtgtggaggtcaagcacacaggcagaggggctgcctgggccgaacctggacacccacttacgttcaatgtgatctagggaagtggctcactgtcttcccactctgcttcctcttgcataaaataaggttaatgatacctaggtcagagcactggacatttgggttgttttctttttttctttattattaacattcccataagaaaaaaaagaaaacttgtacaggtaactctttatgcccacccaagaaaatattcttagaagtgaaattgctgggacaaaaattacacaaaattctaaagtctttgctctgcatcttgctttgtggaaatgcaccaatttatccccatcactagtgtaggagagagactgcttcccacattctgttcaacgctgggcatcattcttctcttagctttgaaatttgatattcagaaaccaacgggtcctgttgttttattttatatttttaattacaggtaaggttgaactttcttcttaggcatattggcatgtgtatatctttcatccataaattgccagttcatgtcttttgcccacttttttctggagttttttcttttgacacagagttttgccctgttgctcaggctggagtgcagtggtgcagtcagagctcactgcagcccaatcctctgggctcaagtgatccttccacctcagctgcccaggtagcttggactacaggtgcgtgccaccacaccggctaatttttgtattttttgtagagatggtgtttcaccatgttgcccagactggtcttgaactcctgggctcaagcgattcacccatcttggcctcccaaagtgctgggattacaggtgtgagccactgtgcccgacatttatctgattactttaattcctttctccttttcctttgagttccagaaacagtatcaagttactttttaaacacagatgccagcatctgtgtgctgtcaattttatgctcactgtctttcctgaggttttcttttcacctcacttgacaattgtgtgtcccttctccaagcagtctttctgaacttcagcctatgttgttttcaagacttcctgcttgttagtctgcttgggatgccataacaaaataccgtgaactgggtggcttaaatagcaaaaatgtattttcttacagttctggaggctggaagtccaagttcagagtgccagcctggccgagttctggtcagggctatcttcctggcttgcagacggctgccttctcactgtgtgctttcccaggagcatgcatgtggagagctctctcttcctcctttcttaaggacactaatcccatcacgagtcctccattctgatgacctaatccaaccccaatcaccttccaaagactctgtcttcaaacaccattgcactgagcttcaccataggaattttggggagggggcaaaattcagtccatagcattgctctcctttcataggcctgatgatgttgagaatcttatgtgaattacaatgaaaggatttttgtaatattttctcctgtttcttgcagcaagcctgtttcatcaagctatattctctcctgttctcagatcagttcctgtcttgtgaacttctgggttttgttgtataactggctatttttttctctgtttgctcatcctgacagatggggaggaagggagtagggatgctgtctatagttgtccagttttcagaaaggagctgcattcacggtaaactttcagagctttgcagaccaaatttgaggggaaggggttggtgttttgatgtatttttgcctttacttggtcagactgatggtctggttgtctctggcaataatgaaagcaacatcagcctgaggcagggcatcgcattcttgagccaagtagaaccctctgtgctgatggggctgactggatccatcaccctgtcatgagtctgcagctcagtgcacctaggtataccctatgtcttcctggacttggagcttgatgccaccacattccagtggagtcagctgggggtgcttatagcagcaagtaacagaacatatgatgaaattggactgagtaacaggagattattattctcccttcagaagacacctgaagctgggtgcttccaggatgggcccagggatcagcagcttgattaaggatgcagagccttccattcctgatgcagagccttccattccttccctgctatcccctcagggacagtgatgccgttggtcatgaccatgagatggctgccaggacccacacatccctcctcctgacaaagtgtgtgagcagaactgctcacgaagcctccttcattttgtcagggaaaatattttttcacagaagctccctgtcttaggtcagttcctccaggagaatgcagggacgagggctccttgcaggattattaagaaggtgctcctatgatggaggggaagaagggaagcaagcacaagattccatgcagagtcagctcagcctgatcctgtgggacctctgcagcgtgaatcatgcttcggagcctgtgccacctcctgggccccaaactcctgcactctttagtcattaaccatgggccatcctagggattataaactcccagatacttctagcccaagggaaagcaattgcaggcaaaggtcaaaagcattcagaaagagttgtcaaatgtagcaagtgtataatacagtattctcagttaaatttgaattttaaatcaataacaagtcatttttagcataagtacgtcccatacaatatttgtgacatacttatactaaaaaagtattcaccgtttctctgaaattcaaattaaattgtgcatcctgtattttatctggccacactaactcagaaaccaaatagagacatataaatgtaagagggacctggtggactctgccataccccctcacatccctttggacaggactgggtcatcgggcctctctcagctgtgaagagtgactgcttcagtctcagtctgggaaggtgggttctcccagcagggaagaggtgggagggagggaacagctggtggggataaagtccacaggttcagccattgagccagcccttccctgttcctgggaagaaacaccgctggagacaggaattccccagtgctgatgtgggtcaacagaaacttcctccattccctgtccacatttctgaagatgtccttcttgaactcacttcctgcctcccatcccgcaatagctgagctgggattcatggtagatgctccctcccagccctgctgtatgacacccactcgggtccctgttcagtgtgaacagcagtgccccttatcttccaccacaggcgactgccccaaattctgctgtcctcatacgcttcatgctctctggtatgagctgggctccatggggctccttgcccaagtgtggataagcacatggcccagctgttaatttgtatagatgggcaccaaaggcaaaatcaagtagggtaactatgacccttgaaaatcactgaacctgcctactacctacagtgtcttctgctgagcatcaaatgcagcatgggcttgtttttagagacccagtggttggaaagtatatgtctttagactctagactccttttccagctgggaagctcacattcgtgtccccaggagccaagctgggctgatggctgattgatatctttgctatattgctatattgttacattactggggataggaaggtgggggtctaaatgcatgtgttcgggtcactaccttgagctgaaaagaggcatcaaaggatttcggaactggaattcccaattttacctacaatgaaacagaattagagagcttgccctggctctgtaattagagggtggcctggctaatgaggactattaaggtttcctaagttgtatgatgacaggagaggagtgagatttaagaaaatgccaaataaaattggacccaacactgatcctacttcagccagataagcccctgtcactggtcgccttcatttctttttgctaaactggttttatatccttgatacacaatgttcttcctcattgccattttgattctttctttaccaaatgtcttagtcagttcagctgctataacaaacataccctagactgggtggcttaagtgacaaattttaattactcacaggtctgggggctgagaagtccacaatgaagacatcagcagatccagtgtctggtgaggactggagggttcctaattggagatgcaccttctcactgtccttacatggcagagagagagaaagcaaattctcatgtctctttttataaccccattcatgaaggctgcatgctcatgacctaaataccaatcaaaggccccacctctaagtatccttatgttaggggttagggcttcaacattggaatgtgtggggggagcacagacatgcagcctatggcaccaaccgccaggagacaccagtgctgggtcaggagctgtctggattctacagaaagcagagcctgaagtgaccccagggagcagggaatccccattgagacaaggaaggaggagacagcaacacaaggctgtgttaccaaggcacagatggctcagttccctgggaccccggagaagcaaacagaagttgtccacctgaacgcagagggtgtgtgctcctgtgcctctgattcaagtatctttcttcttccagtataatgggagtgtggggaaaaggatgcctctttatcgtgactctacttggactttacaatataaatattcagtaggcaaatgtgggctgtttttacagcatcagtctgtcagctggcttcccccattgattgactggctcatgcttctggaccatacctgggtgtggcggagaaggctcccctggcttctgagaaggctgtgaagcagaggatgcccatgcacttggggtggggcatgtggagtctgagctggcaagagccagccactgccgctgacgtcagaggtgcttggagagggtgaggcacgtggacaccacagccagaccttggtgcgaggattgctcatcctcaccagggctcagcaacatacagaggcccagagaggtcaaatgatctccttatatgtccctatccacccagcctctgccccacgagctcaggcctatggaggtggcatgcttcctactctaattcccatatgacttctgtctttcctccaaaaccgtgggctccgaattggcagaattgtctcttttgctgctcaatcccagtgctgagcattggcctgcacctagtaggtcctcagccaatgtttttcaatgaatgcagcaatgatgacatgaaaacagctgtttaaatccctgtgcctctgattcaagtatctttcctcttccagtgtaacaaaagtgtgggggaaaggatgcctctttattgtgattcgacttggattttacaatgtaaatattcagtagccaaaggtgggatgtttttacagcaacgattagcactccggcaggctgggcaaatataacttgtcagatgggattggaggtcttcgagtgttgacttaacacctataaacggcgcagaaacaacccatttctgcctggcccatgcttctcttctcctggcctctcctctcctccacagcagatggtgccctcaggcaagcccgggaggacaccctggctttgggccttggccacctggatgcctatagtgccattttctgagttggagaagaggggctcagggattggcactggaggctggagattcaggatcaagatctcagctggggagtggcagggcggccagcgtgagagccaactcccttgtgggtacttccggccaagaccctccacatcctgaaggtgcctcccagttatcttcctctgagagctgtatggggaagctggggtcaggatcagggagaagcttcggggaaggcagaccggttgcatcatgtctcttcacctccatctgtgcatgtgggcatctggggagtgtggtaattagcagaattactctccacacacacaggaacactcacgtgcacacccagacacatacatacacacatgtgcacacatgcatatccacacacttgcacacatgtacacacatgtgcccacatgcaaatgcacacacacatgcacacacatacatacatgtgcccacaatgcctatgcacacacacacatccacacatacacagtcggctcagacctggcagtagctgacacacttgctgtctagacaaggctaagagctggtgtgccactgttggggagtgggcagctttgagcttcagctggggctgcatgcaaacatgaacacacgctcacgtgtgcacatacatacacacgcatgcacacttgcacactgggatggtttagtaaagtttaattaacatgcagaatgtgcttgatcacacccggggggaaatcccagcgcatggaagggctggacagtgagctcccacgctttggatccctgtcatcaaatcaccatgtatcttggaattaaggaatacgcagcccctggtgatctgccctgtctcctgcaggtgcttccacatgagttttctggaggctgtgccatgctcagtcacttaaatgtccaaccccctttgcaggtaactggctcctccgtggggctgctcggggctcggggttcagggattctagagaggccatctcagacaggcaggaaggaggggctggagtttggctgccagagtcggcggctgctgccttaaaatattccagtcacatcactggcggcgaagccgtaacccgggtgcattgtaagagagggagaatttcattttgtttttgaaatgctgttattacacactcaggaaacccacaaaggcaccttggcaggacaggatcaaataaatacctgaactcggagtgcagcaacatttacttagcaaatgacattttaatgccgcaagtcgaatttacatactaattaaaatttccctttaaaacattgagacttttggcctccccgcctacccaaagtgacaaagattaaaagattttttatgacgtcctgtcagacagagctccctggaaaaggtggagacacattctcaccatccccagactgccttcttgggcagaatttagtggctgggccttggtgccgcggccatcacctgccctgggctgggctggagtcccctaggaggtgaggccctccaaccccgcttactgtgagttgggaaccccagcaggaaaggaggttgagggctgcctcgtaacttggtgaggaggcttcaccatcccttcggtgccttcagggaacgttcttcccggtctttggtggtcctggcgtaattttaaaaatgtgccaagtctacccaggcaggaagcaactctgaaggttcattttggtcctggagccaagagtcccaggccagctgggaacatatccctctctgcctgatgaacaggagaaagagttgccttttccaattgtgttctccctttgtttccccttcctccccaaggcttatgtaagttgtgagggctggatgtttgagtagcagccatttctaggcactgacaagcaagtgcatgcccagatggctccctgtggccatgctgaccttccctccccttctgctcttatgccagagatgcttccttttctcgcctgttcctgggctggcggggggttggggggattctgcctcaaaggtccccagactctctgctcagccatttgatgaataattattaaacacctgcagtggtcaagcaccgaactaggcacaatgggagcaagactgccgagccccctgctcactcggagtgtacattttagccagagagataacttctgttaacaaggtgatcttagagagtgggaggtgccctgctgactctagaaagctgtgcatgagcctgagccctgtcctctctctctccgtaggtatgatctcaattaccttaacaacaaccccaggagggcaacattgtcatcattaccttcatttcatagatgagaaaactaaggctcagacactttaagtaacttgctttggacttaaaaaattgggccccaaatgactctatctcagaggttctgtgcagtaaataaaatgagtgagtggctggagcatgggcctaatttatttctatttattttttaggtaaacattaatagaagtgtaagtgatgttcagataagtgcacaaaccattagcatacagctctaggaatctccacaaagtgattgcactgtgtcctcaccctccacacagaagaatttcagtcccaagcagctccccatcccagtctctgacctataggtcctgacaggtgagttgtgtctcttctccaactgcctgtgactgaactcatacctgttgtatgcgcttttctgtgtctggcttcttttgcacaactttaagttcatgttgttgggtgtgggtgaagcaatgtagcactagtttattcctttctgtactgagcactattccgctgcatgaaatacactatatgtgtccttttacagttggtgaacatttaggctgtttccagtttggggctaatacgcacagctgctgtgtatgtcctcatacaagtcttttgcggacacatatatgtatatctgttgagtctctgcccaggaatggaattgatggatcctcaaccataaacatgttcagctttattagctactgccagagtttccccaagtcaaactattttaccctcacaccagcaggtagttgttccacattttagcctacccttggtattacctgagttttttgtttgtttgtttgttttgtcttgttttgtttggttttagaccgagtctcactcttgtcacccaggctggagtgtagtggcatgatcttggctcactgcaacctccacctcccagattcaaacaattctctgcctcagccttttgagtagctgggattacaggcacccgctaccatgcccggccaatttttttgtatttttagtagagatggggtttcaccatcttggccaggctggtcttgaactcctgacctcgtgatccacccacctcagcctcccaaagtgctgggattacagcacctggcctacctgacttttaaattttagtcattctgttgggtgtgcatggcgtcttactgtggctttcctttgcattgctctactgactacagaggagactatcctttaatgtgtttgtggacaccagaatgtcctttttgtggactgccctttcaagccttttgcccatctttcttgtggcttatctatctttctcttaatcatttgcaggagctctttatatattctgcatggacaaatcctttgttggatatctatataatatggtttggctttgtgtccccacccaaatctcatcttgaattgtaatcccataatccccacatgtcacgggaggaacccagtgggaggtaattgaatcatgggagtggttccccccatgctgttcttgtgttaatgagttctcacaagatctgatggttttataaggagcttttcccccttttgcttggcacttctccttcctgccaccatgtgaagaaggacatgtttgcttccccttccaccatgattgtaagtttcctgaggcctccccagccctgtggaactgtaagtcaattaagccgcttttctttataaattactgagtctcaggtatgtctttataacagcatgagaatggactaatacatatattgcacacattttcttgctctctgtggcctttttaactctcataatggtttcctttgatggataaaagttcttaactgcaaggtagtccaatttagcaatctttcgcattttagacaatgttatttgtgtcctgcttaagaattatttgcctactccagggttataaagataatttccttcatcatcatattgaagccttattgttttaccttctacatttaaattcataagcactcttagaattgctttttgtgtatggtgtgaggtaaggatcagggaaagctcctctgagtcacataagccatggcccactctgagcttgcagcaaatcagtgtggtttacaatgagtgagagggcaggggagaggcttgttctagggccttgaaacctcttcccctgttagcaccataaaaataaaaataaatatattcttctcttccctcatgaaagacacatctaccatgatttacccttttttgagaaaatgtctggggcttttctaggtgaatctgaagcaaaccaggacaaacgactccccagtgattcactcatacatcttgagtgaatgattctcattacccattcattcaatgaggtttcttaaccacttactgtgtgctgagaattgaagatacaacaatgggctaaaagagataaggtctccaccttcacagagccagacctcttgtgagggagacagctcttatgacaaaagctctgacttgggatcaaagggaaaagtgcatgaggctagaagagtttagaataggaagcaaacctacttagggggctctggggatgtttccctgagcaaatgacaactgatcaggacctaaaggatgactagttgctaattaggtaaagagagaagagaaaagctttccaagtggagggaccagcatgtgcaaagatcctgaggttggagagagcagaatgagcaccaggggctatgagaagcctggtgtgccagaggccttgtgggtacatggagtccaaggaagttggctgaaaccaagacatgcagaatagaatgttaggaggactgcaggatttgaagatgagcaggcaagacatgacttaattttggagaaggtttagagaagatggcctgggctgctgggtggaaagcaacttgaaaaccaaagggtctgggacatttgcacacgttccaagctagtctcctggcactcatgatcatgccatccctgagtgtcctgtttggccgtgggttttccactccaccctggggccttcctgggccaccctgaccatgggttctactctttcaccaccccaggcaggctcagcctcttttgtcccagttcttccttgcaggccagtagtttatggttcacccagaccttccccttctacaaagtccttcctccactctttgttgtttttaccaacctaggagctgactcccctccctgaaagaaacacctatttattgggtgttgggagggagatggcgttcctgctcctctagatgacatctgttcaaatccctgatgtgttcctgctctactcatacatgaagttgcccaaatatattctcccaggcactcagtccaaggaaggttgtcagtggcagtccctctggaagccactggcaagttactggacaccatgactatgtgcagctgccccttaaccagcaacatggagctatctccacagaaagaggcatgagccaagggtgcaaagtgcatttccacctataaacaagacccactcagcccagcttcaaaggaagggtcacttctgttcagccaacaaacacatcatagcaatagatgtccagaacaggagacctcagctttggcagaggaggtaaataacagacattcgaataattccactcccaccccaactgatctgcgctccaccatactcccatggaaaaggaggctgagaggacttaggagtcagcactcaggctgcaggtgagatccaggctgggaccatgtagtaagaagacatgaggagttttttggtctcagacccctccccacccccaccctcaaagcattctgggatgctccgttccttctggacatagttttcttcccaattttcttgattcttaaaatgttcttaaaatataggtcttgcattaaggattagaattttccagtggtcacagagtaatgaaaaccaactgagagtctgttttggaaaaataaaagaccacaaggaaagactctgaaacacaaaaccaaaggaatctttctgccccataagtcagaaacccatggatatgctgtttatctgtttatttttattagagaagcattctaggagagcaagctctctcgtgggaggatttgcaagtgtgatgggtgggggcagatatggcattacttaattggcttaaaattttgtcttctctgccaaagctaaggagtccctgctctggttatctactattacctaaaaaccaccccaaaaatcagaacttcatgcagctgtttatcactatgctgcatcacaactctgcatgccaggcggatgacacacagcagggacagcacaagtctgggacctcagctcagaagacttgaacaactgggggatgactgggcatctttcctcctcctcctccttcccccttcctcctcccttttctcctcctcctccccctcttcctcctcccttttctcctcatcccccttcttctcctcccccccccacccttctcctcctccttctcctcctcctccttctcctcctcctcctccttttcctcctcctcttcttcaccctcctcttcctcaccctcctcttcttcaccctcctcttcttcctcctcctccttttcttcctcccccttctcctccttctccctgtccacctcctccccatcttcctcctcctttctctttctctcccttttccccatccttcttctcctcctcttattcttcctgccccttctcctcatcctcctcctccttcttgtctccctcctcctccttcttgtctccctcctcctccttcttcttctcctcctccttcctctcctcctcctcctcctctttgtctctctctcctcctccttatcctctatctacatggcccaatgtggctagtttgggcttcctcacagcatggcagcctcagagcagtcagaatccatccatgagtgctcagggtatcaagaggaaaaaagtggaaggtagcagtccccttaaagacaaagcctggaatggacagagcatcccttccaccataccggttggtcaggcaccagccatgatacaagatgagacaacatgaactttacctctcaatgggagggaccccaaataatttgtagccatctttaattcccacaactctgaaccccgtattacttgggaacctgaaggacagaaatgagaaatgacaagaatcaaaccaaaataaatagaacactctaggtgggtcagaaaaaaataaaaagcagaaaatgtaatatgctgcctctatgtgtcccaggggaaagataaaagccatgcattcattcatggatttgtttgcttattcactcattcattcaatgaagggaagacctactatgtgcaaggcactcttcctgccactagagacacggcaataaacaggccatatgagaccctgctatcatgcaacttgcgaaaaactatcagaggacgaagacattaaacacataattacaaaatatttaactttcaaaaggcaacaacatggaagcatcaaaccatgaattggggtacatgactcaaaaagaaggatcagaagaggttcctctgaataaaggctgtctaaactgggcaaataaaataagctgaagttttatgagcaaggagaggaaagagaatgtccctgactgaggaaatagtttgggattgtaagcagaaagacagagagatggctggggtggctggagctcagggctgggcaagatagtggggcctggttgtgcaggggctcatcagggccttgtctcatcatagggacaatggtaagctcttggaaggtgttcagcagagaaaagacctggctggacttgcatttcctaagcttatcctggaggggttggagaggacagcaggagaccacgaggagttggctgtaattgatgaggtgacaggagctcgctccaagtaggtgctatggaaatggagaacattcaggaagtggaattggctgtccctggtgatgacaaaaacatggtttatgggaggctcccaattaatatttatgcaataagtgaacaaacgaatgaattgattcagcctcagagatgagagagaagcgggtgcttcaaggtggctccaggtgttggggtttgagtcccatagtggattttggagactgtaggtggagcagcttggcgggaagcagagagggtagatgaaagtcagtcccagaccctatgagcttctggttgccacggaacagccacccctccctcccaggatgtggctgtctctggggcctggaagtcactggctgctttgtttctgggctaagcattgggacagggccagcctcctctgctaagccaggcacttggccagaatgtgggtcccactggaaggtgggctttgtcctgagagaactcatggtagtgcaggaggcaggaggctgcagcctgccccaagggctggaccagacatgttgatgtctcctggagagagctgagtctccaacccccattgtttgatggtgctcatctcaatggggtgcacacccagccctgggcctccagtcttaattataccccagactgtttgcagtgtgtaattaccgccattaattgactgagggcggccacacttctcccctccagccgtctttctgacactgagatccgccacacagcgcatctgcctgcacaggcaggaaggaaaagtggcagggtctgcctttattttattaccaagaaatattatttctgtgattttctggaagaagcagggtggaggtgcaggctgaggtctgtccagctcattctgtgcctgctttggaatgtgggcactgagaaattaagtattgaatgaagattttccatattgtcctttctcttccgtggagaccccgcagtacctgggccatatattattatactgtgcttcttctcctagaagaagaaacataataatagacaaacaaaatgaaacacacacaaaaataaaaacaagaacaaactccaattcattgcttgaatttgtgttctaaatacaagaaatagtttctgcattccacacaaatccctatcttccttcctttcttgtttccttccttccttctttccttcttttcttccctcatcccttctgcttttattcctgtcaatctaatctagctgattatatctatatctatagtgcttggtgagccttggttttaccctccatatctgtggaatctctctatagctatataatggtttgtgaaccttggttttctcatttggaaaagggagaaaaaagtaccaccctctcaggtttctgtaaagattaaatgaatgtaaaatgtaaccctggctcctggtgtgtgagtcctcaactgcagcattagcgaagtcatgccagacatgggtagtgtcctctgtgtcctgcttgggaactggcacattgtgacttgggtttgaattcagtgcattcaaacctgggggggtatatggtggcccaggtacttcagggtcctgtggaaaagaaatgaccctaggacaatatggaaagtcttctttcaatacttaatttctcattccctgccacccacagcaagcaccaaatgagctggacagacctcagcctgcacctccaccccgtaatcaatgtggttgtcctcatcccttacactgtacacactgagaggtgacaaagctttcaccttaacaggaagcaggtgttttttgttcgtttgttttgttttgtttgtgtcttttgttttgtttgagatggagtcttgctctgttgcccaggctggagtgcagcggcgcaatctctgctcactgcagcctccgcctcccaggttccagcaactctcctgcctcagcttcccgagtagctgggactacaagtgctcgccaccaggcccagctgaagcaggtgtttttatgccttctttacagatggcagagcaccccactgccaagtgaagttgagattggttaagagacttctctagggtcacacagctgagaggtgaaggcaggactggaatcccacctactgactcctgtcctgtgctcctgccacaagagcggcctgcaccacgtgctcattcctgcatgtgcctgcacggaagctgagtgtcctcaaaaccatccctcggggaaaagggcaacccctccagggagcgcccacagcctctcgagctgccaggctctctctcaattttcatgtcagtggcacctgtgagtttgtcctcactccaatccagggagctcgggcaatcactgggcacaaccgccatgggaagcaggggccgtgtaagatcctccgctctctccaggctccaggagaagggggcatctcccaagaggtacaggggcaggcggttagaggcaaaggcatgtggacgccaggtgggtgagcagaggggtcaaggggcttgaaggtggtctgagcggagcacctgcaatgcctgcacgggctgtgtctcctcatccgtgaaacgggaatgatgatgaaaccatgtcctgtagtagcgccggtggtcccatgcgagccttccattcagatgtgagtacaaacaaattaaaaccacaaactgatcttcctctgctctcacaccacaacaagcaacacagaaaacttccgtgagcaaatgtgtgggggtttcttcccaccagcaagcaagcaatcaattctgcagtgatgccagctgggtgtcccctaattccattctgcagagatagtgtcagatcccacaggtggagggttctgtccctgaagctgcctccatcatttcagcacgaagtgcaagccccttcacttctgacctgtaaatcggggttctcaaaaccttcccctcaagcttaatttatttcctagacaggctcacagaactcagggaaatgcatgtttaccagttgatgacaaaggataatttaaagaatacaaatgaacagctggacgaagaggcacgcagggcaagggctggaagcatcctgagtgcagggccttctggccccaaggagttgggaggcgccactcctctggcttaaggatgcttcttgttcacctttctgcaagtctctacatggtcagctatccagaagctccccgagccctgtccttttgggtttttagagaagcttcattacatatgcatgattgatgaaatcattggccaccggtgagccacttaaccctcagcccctctcccctgcctgggagtgagctgaaagtcccacctctctcatcctgccttggtatctttcttgtgaccaaccccatcctgacgctacctaggggctgccagccaccagtcaactcattagcagatgaaaagataacgctttggagttcctaaggatgtcaggagttatattccaggaaatggagttgaagtatatatttcacaatatcataaaaatattctttccttctttcatcctcagagaatcatcactaacagagaatgtgctggagttccagggcctgataccttactgaccccttgggtgctgggcacctgagccccttggtctccaaaagcctcactgtgatttggagagggccacaggcctgcgctctggccagcgtgtgggcacttatagtagagatgcccagctaaggtagccacatgccttcacctctctcccttacaggcccttctcctgagttagtcctaggtggtcctgggtggtttcttgagatctcaggagaaagttcctctaaaaacccaaggtggaggctctgtcactgtcctgttgtgtcccttgatctaaaacccgtttgcagcactcagtcccaatatcccactcagggaggccattcttctcccgggaaaacagctttccagttcagctctggttagtgggaacaggggtgtggagtcaacagaagcaagcctggggcacgtcaggataaatgccctgtttctagtagtgtaattagactaatcgtagtaattgtactaactgacatttttgaaattgtactctacatgctatgattaacacctccatttcatagataaggaaactaaggctcagggaggtaaagtaactccctgaagtttaccaggaaggtgtccaggaatggtgctggcttttcctgtccttcttggaagtgggagaggtggagggatttgccctcacccagagcaatgaggaaatgaaacagcgtctaccagccctccacactgcaggaggaaactcggcagtcacacagggcattgttaggagggggcacagtagctattcatttgtttcaatggggattatttttttcttggcatcttttgtgcatcagcgtcttcagaagtgaggatatcccagcccctagatgtgactcagcagacccctgggggaaagctggggcactgtagaccatcccagggggccaagccaggccggtgcagcctgagggcaccacagccccagcttgtggccagtgtggatgctcccggggaagcaccatccctgctccagcctcgcttgaacaagagctgatgccaccctgcccggcatccctccccacttctttgaatgacagtcttcaggctttgtttggggacctccccctgcccttttctcagacgatgagatctggatggggctccattgctggccagcacacatctgtcagtcttcatcttcctgggcacggggtgggtgtgtggccaccttaggctggggcagtcagagcgaacttcagacatgcctggaccctggagaggaggctctctctgtacacttggctttggagctgtaaggatggggagcttctgccaacatctcaaccccccagaggggaagagccagcctctgaatggagccatcctaggagagcagggacaggagggagaagatcagtctcttcccccacgcaagtctgcagtagggtctcaaacacaaacctttacatctccattctctgtgaatcccatcaatggcacaatgccctccagagaaggttccagtgttcagcatggtaggtgaggccaactgcgtctggcccccgcccacctctccagtcccttctctcacatgaccccttctccaggctttgcttaatccagtgtgaacttctcaccctgtccttagggatcaatattctccttgcctctgggtatttgctcctaagttctcgctgcccagtaacacgttgtcccctctttccgtggccggctccatgtgatcgcaggtctcagtttggtggtcacttttccccgattcatcagctctccgtgggttgccccttctgtgttctcacagcacccatgcttcctctaataatagccccatcaaatcaaacggttgactttctctgtttactttctgtcttagtttgttttctgttgcttataacagaacacttgaaccggtaatttgtaaagaaaaggaatttatttcttacagttgtgaagtctgagaagtcaatgggtcacatctgatgagggccttgttgctggtggggacactttgcagagtcccaaggtagggcagagcatcgcagggtgaggaggctgtgcacgctcactcaggcctctcttcctcttcttgtaaagccaccagtccccctcgcgtgataactcattaacccattaatctattaatccatgaatggatcagtccattcatgacggcagagctttcatgatcgaactggaaccgcctttgcaaaaattacgaggtgaaaaaattatgacagtgaaagagatctgatctaaccgacccccatcttgcctttaactccaaaccgcccttggtcattcctgggcataacagcccttcccccagactaaaccacctttgtgaagctaatgaaaccaccaggttaggaggatgagaggagcctgaattctgctaaggtgtagatgggaaggattaccagccattattccagaggccacgaggcttgcaactctcccaattactcctgcaaataacatcaccattgtagaacctaagattagccttttgagatgtcttttcaggcttttgcatttctgatgaccgatggctccaccccaaccagccaacccacccagcggtcctatggccccacctggaaccagactcagtgcctatgagaagcgttttccacatccctatgattgcacccccagctaatcagcagtgcccatttcattgcctgacaaactgtctttgaaaaaccctcgcctctgaattttcagggaggttgatttgagtaacaataaaactcagttgaagggggcaaatattcaaaccatagtactagctttaatgaactttgtattttgagataattatagatccacacgcacttgtaagaaagaatgtagagagatctcaaggacccttccctcatttccccagtggtcacatcctacacaactacaagacaataccacaaccagaatattgacattgatacaagccaggaaccttgtgtggattccagcaaactgacctgtgtttacttgagtgtgtgtgtttagttctgtgggatgttatcacctctgtcgattagtgtgatcccaccacagtcagggtacagatggttctctgaaaggaccccttgtgctgcccttttaaagccacagccaccgcctcctcttcccacctcatctcagtcgttggcaaccactgatgtattctccacctctattatgttgtcatttaaaaatattatatgaatggaataatttagtgcataacatcttgagattgctttttttccactctgcacaattctctgaatatccatccaagttgttgcatctcatactttcccttttaatggctgcatagtattccatgacatggacatacctcagtttgttcaaccattcagccattgaagggcatctatattgtttccagttggagactattacgaataaagttgctataaacatttatgtacaggctttggggagaagataaattttcatgtctctagggtaaatgcccaagaatgcaacagttcacatttggaagagcatataccattagttatgacttgcctgcaaaagcagactcccggagtggggcccaataccctaggaggcagtgagaccgatcctgcctctccctaggggccaaagtcccagcctgcaaacacggactttcctctctttcccacttaaaaaaaatatgcttatggtttatttatataattcacatgcaaccttggctctttcaagaaatattcattcactcattccacaaatatttatctggtgcccactctgtgtaaggcacaacccgaggcaccaaggagacagaggcaaacaaaatccaattcctcatgccaggtatttacattatagtgtcaggagatgagcagcaaatgaatgaacaagctgacgctgatgcagacatggctttctcaaagtgctgtagagaagtgtattcttttgaaggcaaaggacagttcagccagtgaagttgtgtggagggagtgagatagctcgatcaaacctaaagagacttgtggaccttggagagtcttaggcttttatttttggtgagaaaaaaacaatgggaagatcttgagcaaatcagcgacaaggtgaggcttatactttcacagacctttggctgctgtgggctacagcctggtgagcggggtgggcagaggggcagctcagcacagtgacagtcaccccagggaagtttgatgacctgaaccaatttagcagaggtggagggggtgagaggtggttgatggaactgatcggatttgtggatggatcagatgttgggggaggaagaaagagaaagtgtgagaggtcaaggaggaccccaaggcaagagaaacaggaagaatgggatttgcattggtggggcatgggaggtttggtggggctggagcacgggaggttcaggggagctggggcatgggaggttttgtggggctggaccacaggaggttcgggggagctggggcatgggaggtttggtgggggcatcaggagtgtcagtctaggctgtggattgagccaacactcaggcatccacaagagtcaagcaagagggtttttcttgaaaagcagagagaactttccatcatctttgttgctaattcagataagccggcagcatgggtggggtgggggtcgagtctgtgggtccagaggcagagggaaaataactggtgcccgaggggaggtaggacccaggtggaaacagggtctgggcttttggaaagagagggacacagaaattctctcacatggctctgttttcccagtgatatgggaaacaaggcccacagtgggaagcagagaggcagcttggagaagacggcaggaaatagcagtctaagagcgtgggagaggaaaccagccagggtggggctgatctgccaggcggcactgaaggcctgagtgacactggtgattaagtggtgattttttaaataatttaaaaacttaagaataaagtacttactcggaacactgaccttggagtcttagagatctgggtgcaaattctgtcgttgctgagtctcaggtaagttgcatcgcctctctgagcctcagtttctttatctgtaaaatggggatggtgaatctaccccgtggggttgtgtcaggggtcaaatgaggtaatgcgtgtgcagcatcctgcacagaagctggcaggggacacgagctcatcgagggaatgtattctcaccgccttcgcagagccctctgagcacccaggcagttgtcccttccccctacatctcactatcccttttgtaaaactgaccccactgctttgtgttcccgcatcttcctctccaaatggacagtgagttcctgcaaggggaacctagtcttgttcattttgggtcccttcagacccctggaggttgcagagagaatgcagggtgagaggagcaatgcccacctgcggtccagagagggaggccggacccctggagaccagcaagttcgggcctgcagctctgggctgatataagttatgggcaggccctgagtccactgtctaccgaggttgagtctttcataaataaaatcaaatacacattgcaggggttcggggaaggaaacaaggaaattgtaaaatcaataggcactgacgcctgaatttactatggcatctgagatactgaaaacgaagggtctggatctgaaaacattagcatttcaaaagtgctcaacaccatcctggtggggaaagaggagcttcactccagattagatcatcgagcaattgctgaaatttcagcctttcggtgcatagacaataactccttcctgacatccttatggatggaacggtctctgtctcggggccatttccaaaagccatgaatagagcggagaaacaatttcccactgtggctcctggcacgaaaaagctgacttagagttgcatttgcattcatgtcaggtgaggatgtaattattgattgaaagtgagatttttgtcctgaaaggaagatgcatgagtgtgggagggagtcaggtgtgttgttgtgcagatcccaaatcctaggcagtttctgagagaaaccaaagcttggtgtttatgcctttggccgtggagcccattaactgttttgctctctgagctaattcactgggagtgattgagacgcctgaggtttctaaacctgcctttccagatttatctatacacagtcatcaaatcacattccatgttcaactaaagccttgtcatttgttgattttgtgcatcagctatactgagccacaagagataccatggcgaacaaaggcagggactcccctgtactctccctccactttccctgtccacatcttggcttcagttactctctgtctggatgctctcatccctacccaaatctccactgttttaaaggcccatccaaatgacatgtctccacaaagctcacttaggtcccctatgtcaatcaggagtctctccattgcaagagacagaaaattaactcaccatgatttttaaaaaaataaagaacaggacaatttattggcacacataattgaagaatccagagggagaccttcaggcatggtttgatctaggagctcggtggatgctattagggtatgctctttctctctctctgctctgattctctgtgagtaggcccagcccactgtacaggggcacatgggcacagacattgtgcgtcccatatccttgggctctaaacactagaaagaacttctatctctcagtgtccaagtatggaagtctcaggaaaggacatgaattgggtctggcctggggtttggagttggaggttctaattggtagcactttgcacacacattcgcctgacccccaaccaccttcacgaaatggggaagggtagtttcctgaagaaagagccaggatactggcaaacaggagtgagggggtggggacaatactgggtaccccttccccatgctcaatccctccattaaccagagcccaccactctaggaggggcctctcttatgggctgctctgggagcttgccttgactccctgctggtccaagagctccctgaaggccgcagtagttgtgtgtccatctgcacatccccaaagcccagggcagggctggtgcccagagagctctcaacagcatttggtgggctgggttaggggagatttctgccagtggcaatgagagtgagaaccatgccctccctttcctaggattttggggctaaagatacaggcaagagaatgagaatgagaggtggcgttcaagcgcgtcagcaaagtaggcagttctgggtgctgtggtttggggctcctaggagctccctgaccgctccctaaatatcttccctttttcatcacagatttgtatcttggcgtcttgtatctttgggagccctcaacagaaatgcacggattcatgaacagagtttctgtttctgtcctctggtgaagagtgtggtagctgttccctgccctgagaaactgtggaaggtccctctcagcattgctgtctgcctgaacccacactcctcctctgcggaaggggcaagcacccatacatgggctgtgctcatgtcaagtgtagacccgctgccatcacagggaatgacagggaaaggcaaagcagcccctttctcaaatcctggcacagtgaaagcacaaagggtgctatatggatctaggggaggggcccagtgagcagcctgccatcatcaggtaggcaccttgtccctgctaaatgagttgtcaaaagaaggacattaacctctttgagcagacgtgaaccaacgtcactctgatcaataggtgccagcatcctgtacgggctcatgcccaaagcaaatgtggaccaagggaggggcgcgctggcatattatcagctgcttacaaccagacacgggcatcggatccttgcagccgtggcgggatacgtggccagcaggagagggatccaggccaggcagggtgggggagggctgggaagaggcaggacgtgccaggaggactcagccctgacccaagggtctcctagctagcaaaaccccagtgaaatacccttcccttgtaaatcgtcatcaatagacagaactggactcacaagggctcgtggatagatggatttcttcaaccttttaatgctgcccatcaaatccctgcccaaaacatcatttgagctgagccagatggattcctttttcagggttagtcagtctggatccatctcacctgctgtgattaagcaatcacagcaaagcgggaatgaattacagagcacggctgtctgtcgtctggcctccctcctggagaggtgtcctggcgggggcggccatgtggggtgaggtcagagtcatcggctccactgcacagacagtaaacacagccaaacacaggcagtccccagggaagaaagattttgtgattctttacattaactataaacaaggcggtggtggttgctgttgttgtttttaaccaagcatatttttaaggagtgtttaatgggactgcgcctgccatatacctataaactctgcgtgacagcacgctggctccagcagaatttgatatacacaactccaaacaaataatcatatctgacaggcaatttctccaataaacccagtgaaatatttcccactgcaggggaggcagtgtgcccacggccttccgcaaaaactggcatgattcgggggtgctgaggggagtgggagctgaggcttgtttacagagaaggctcccggacggtagggacagggagatacatcgtgaattttaaaatgcagacaggatcagtcttctgttaaacacccaggcaccttctgggggagggattggtttaagcatttgccccatgagccatggaggttagggggctgtgggaaacctcccattttcttgaaaggccattgacaaaatgggattcctgcatcctggggaaggggcttccttgtgttctagacaggagtgttgttgtctctctgcttaagaaccaagttccggggggaggaatctcactggcctggcccaggacagcgtggggtctctccttaacagctccatcagacagcgagaccccaaacgtggcttcattcaagcagaccttgccatggtgtcagcacctcgggccttggacactgcctcgtgcttccctctgctccagtctggttttccagcttctttactaagagagttctaggaaatcctcatttgcgtaagcaagtcaaaggtgctctctgttgcttgcaacccaggagccatgaccagcatactgtattccacatctgtgaaacgggcacagcttccagttttattggcattgggtgctaaccagatccctgtggtaagtgttacaccagagggtcccaaatttgttggtctcaggactcctcaaaattaacgagaaccccaaagggcttttgtctatgtaggttgtatctatcaatatttctgtgttagaaataaaaaggaataattttttaaacacgggaatcacagcacagattgatttcatcagccagcaaagcaatgatgtcctcgcatttcatggagctgctggaaaactccaccgtactctcacaagagaatgaggactaaaaggcaaatcgtggccttaggaatacccaggggtcccggggccacacatttgaagaactgctgtgctaggtaatccttacaatggccctcggcccattttacagctgagaggactgatgctcggaactgagaagaggctgactctagggctagggagtggatttgaacctggtcttgagactctaaagcctgaacatcacctcttccctttgccccatcaagagtggtccagaggaaggacgactccctctcacagttcccagatatcacctctgccctctgcacacttgccccttcctcttcctgttcaccagctgccacgcctcacttcctgtcagcctccagctaggcagcctggggctcgctttccagcctccatcccagggaagcggctgcctcctgagggaggccaggcctggacaggtccccgatgtctgtttccaagcccgactcagtccgtcctgcagggtggcagatgcttctcccatcttggtagttcctgctatgcatggaagccatcgccttccaggggctggcatagctgtgattaagagcgggctttggccccacatgaagctaggtgcaaattcttgccccaccccatgctagcgggtggttccggatgtgtatgttccctcttgaagcttccttttccctgcctgtaaaatgggactaatggtgtaaaggcccctaggtctgacctacctgtccgtctctggtcctccctctctgcactcattactctgcgtctaattagtcttccctccatttcctccgtgtgcctcgtgactttgcacaccctgttccgctgcctggaaggtcctcccccacctctctcctttccgtcctcagagccacctttcagatctcagctgaatgaggcattccttggtaaccctgttcagacagaaattatagaggccacagtgagagcgcaaaatggtgatcttagcgatgccatcatatgtcacttaacgacagggatgtgttctgcaaaatgagttgttaggtgacctcatcattgtgcaaacatcatacagcctgctgcacaaacccagatggtgtagcctcctacacaccgggctatgtgtgtagcctgtgcggccatggctgtactgaatactgcaggcagtcgcaacacatggtgagtgtttgtgtatctaaacctatctcaacacagacgaggtacagtaaaatatggtataaaaaatttaaaactgctacacctgtataggatacctgcatgaatggagctcccaggactggacgttggtgtgggcgaaccagtgagtgagtgtggagagatgtggtgacctgggacattaccgctccctgcttcacactttataaacactgtacactttggcaacgcaacatgtgtaaaaacatatttttctttcttcaataataaatcaatttagcttagtgtcaatttttacttttttaattttttaactttttgatgcttttctagtaacacttagcttaaaacaaacacattgtacagatgtacaaaaatattttctttctttctttcaacaagcttgcagttgtgttttctttctttatatctttattctataaacttttttctactttaaatatttttttaagttttacttttactctttaaacttttttgttaaaaactaagacacaagcacacacttgagcctaggcctagacagggacaggatcctcagaatcactgttttccacctccacatcttgtcccactggaaggtcttcggggcaataacacgcatggagctgccatcttctatgatagcaatgccttcttccagattcctcctgaaagacctgcctaaggctgctttacaggtaactttatatatacataaactttatatatacatatatttatatgtgtgtatatatatatatatggagtacatgcttaaataataagaggtataatatagtaattacataaaccagtaacagagtaatttattatcaagtattatgtaccacacataattttacgtgctagacttttatatgactaccagcacggtaggtttgtttgcaccagtgtcacaacaaacacacaaggaatgcgtcctgctccgaagttatgatggctgtgatgtcaccaggttacaggaatctggcaactccattatcatgttatgtgaccaccattgtgtatgcggtccatcattaaccaaaacgctgttatgaggtgcaagactgtcattacataatcacttgtgtgattatttattttgtacctatagtccctttgagacctgcactctccaatacaggcatcactagccacatgtggcattttacatttaaattaattaccattaaatacaattaaaaattcagctcctcagtgctccattaaccgctcggccattaccattttagtgccagtggcggcccctgagtgtctttgcctgagagccatcagtggctgctcaagcctcttgtacccacacatgaggcaagctgaaggtgcccaggaaaagcagtgcccaaccaatgaatgccaggagttagcatgtcagtatcccagctcccttgtccctcctgcagggtaactgatgtgtttctacccagactccttggactgggtccactcatcaccctgaccagtcaagaggtgtcccagccatgtctctgggaagaaacagctgagatttccctcaagagaaaactgaagtgcttgacacaacatgcacagagatacaagcagagagaggaccatcgagtggggaatgcagctaagaccagcaatagctggcaagggccagaaactgcctcactgaaacctagcaggagctggacccaggattgggtccccttgtccctgtccaccataggagctgtggcccttggaggccaggccgcgtgacaacctggggagaaggacacacaacctcctgtctctcctctcatcctccattctgcaagtgctcattttggacaaacctaatcagaagtcagaggacaagggacaccatggatgcagtttttaaaggccatcttcccagggctcaggataggatggagacagacagagaatgggtgagggttgggcggggaggctggagaatacttagtccaggtgggcacagtgctctttcttctagaactttgactcttcaattgaatgatgaaattattagatgctgggagaaacagttcctttattcctgcaagaagaccagcgagtctgtcattactcccagctaccatgattcccttgttctgccccagagctgtttattccaagccaggttctccagcctcccttgcttatcctgggtcctccctgtgccctcccagcaaatgtgctctttgctgccagtggccggtatcagtttctgttgcttacaaccatcaagccctacctgggcaaagcccatacgagaccctgatgcttttgggggcagcagaacaggacatgaatatagacattttggtaacattcatcatcccaaacagattttagggcctaggaaacttgcctgggacaccacactcagtgggtagcacaagtcaagacagagccagtgcagcaaagacttaccctggtattgtttctagggctgggagcccttgttttaatggaccaagcagctcatcttcctctgttttcccgcctactcctacattggactttgacctgtcacttggacacatgaagcttgttgttacctcagagcctttgcaccagctgtccccacctcacagtccttcactccttacccatatttacctacttagtgcagagctggaattccaaaacaggagaccccacatcccagcctcatgaatgaggaattggaacatggaattgaataaggaaaagtccactgattttgtatgaggcaagaacagacactgagtgcaagggccggggcaggaatggggagcatctggtccatacggtaggcaaaagtcaagttaaatttggacccgtgctgcctcttatgttcagaagaagccaggatcctgtggccccagagtaatcactggctgtcgtgcaatcaccgtggattcacaggccctccccctgccaggcccttcacggtgacacctgctagtgaactccactttctgctgtggacttaaagggcacatcagacctgtctgcactatttttgagatttcctctgaatctgtaattccccaaaacaaagaaaatcaaatcaaaggagaagcagcaagcatggggccttgtggcgcctggacaaccatcttgaggggtgtggccttcatggcaggggtggggtggaagcgggtgactattctccattggtgttaggttttaggccaggagatgtgagcctttaggctgctgggggtagctggatcggggtgagtgagtggacaagtgagccttagctaggaggtcaatgatagtccaggcatgagccatgggctgggggcgatggaaacgggcagtggagacagacccagaaggcaccaatgaggcaatgaggcagaacccacagagcttggcgactctccatggagtctggtggctcaagtgagccaaggctgacccgaagggggatttttttctgctggacagggagctctagaaagacaaggatcctgtttcctggaacttctagggcctagatcggtgcagagcagagacagagggctgagggtcagccatctggagagaggatcaagaaggggttaccctacactcgccctccccaaaccccatcccacctccaggaaggctccccatgctttgtttgctcagaggagtctgatgcgttccctaaaagtagattaaaacatgctctggaatgctccctggaggccgggaacagaagtcttgagcctggagtgaacattaaatacatatgggtaaggcccccagcagcattcggaatgaggccggagctcgcggccatatggggatgtggttgtggaaaaaaaatatttataaaatggcttttccaaatgtttaatctacagcagatgcatctaaaattaatctgtttggcttggctttcactgtggggagatgccatttcatcgtgccggccgcctggagcagaggaaatgggggttgtaaaagattcatctgtttgtgagtcaactccaaatgagatcttcagagggcagggaggcagtggaggcaggagagcaggtctgggaagaaagggaaagaggttcccccacacccctgattcccatgggtcacccacacgttaactctcatctcatggatgctatatgttgaacctttcccactggagtaataatctgatggctgtgtttcttactaagatgttgcactgtcattccgactacagttgagtaatgggtcccacaatgactcctacgtgtggtgtttccattatttttgcagaagggaaaacaatcccctactgagagtgctttatactagagaagtttctggaatgggaaacagaaccactgacttctccagcctccttctcagtatacacagccaccttcgccatctcacagatcctaagccctttccaactgcagggcctttgcatactctgctccctctgcctggaaactctcccttcctgctttagactaaatatcaattcctcagtgaggcctttcctgaacttccaagcccggagcgggtgtgccccgtggtctctcttcactgttcttaagacattcacaacctcattttgatggtgggacgctgcagctcacgtctgagtcccatccaagacttggcccactgctgtgccctgcacagatggacagatggttggaaggatggatggatggatggatggatggatggatggatggggttggatggatggatggatggatggatggatagtggatagatggatgaatagtggatggataaatggattaatggatggatgaatggatgatggatggatgaatgagatggatggattgatggatggatggatggatggatggatggatggatggatggatggaagaatggatgatggatggatgagatggatggatggatggatggatggatggatggatggatggaagaatggatgatggatggatgagatggatggatggatggatggatggggggttggatggatggatggatggatggatggatagtggatagatggatgaatagtgaatggataaatggattaatggatggatggatagtggatagatggatgaatagtggatggataaatggattaatggatggatgaatggatgatggatggatgaatgagatggatggattgatggatggatggatggatggatggatggatggaagaatggatgatggatggatgaatgagatgggtggattgatggatggatggatggatggatggatggatggatggatggcagatggatggatccatctatgtcaggcctgcatgacacctggtgtggaggagccacccagtcaacatttgctgacaggatggacagacagagaggaggtgagtgacaggggccctcaggtgctttttctttggagacctgggcaaggaaacaagacacctggaagcaagtgcatttttgtgaaagtgtgcaggtcctcacagtcctggaatgctccccccgaaacctggtctgagaagagggaaggggacaggctcccccaggaaaccctcaagcttcatttttagctactcaggtgtgggaggcagaataatgttctccaaaatgtccacgcctcaaccccaagagcctgtgaatatgtcgccgtacgtggcaaagagactttgcagatgtgattatataagatttacagatgggcagatgaccctcgattatctggttatctaaacacgcacaatctagttacttgagtgtcaacatcactcatcattagggaaatgcaaatcaaaaccacaatgagataccccctccccaaacacactcattagcatggctactattaaaaaaaacaaaaaacaaaaaaaaaaaaaaacagaaaataacaagtgttggtgagaatgtgagaatgtggagaaatgggaaattttgtgcattgttagtgagaatataaaatgaaaaacagtatggtgctttctcaaaaaattaaaaataaaattatcatcatgtgatccagcaattccacttctgggtatatgccccaaagaatgaagcagggacttgaacagacacctgtgcacctgtgtttacagcagcgtcattcacaatagccaaaaggcagaagcaacccaagtgtccactgatagatgaatgaatacacaatgtggtgcacccaaacaatggaatattatacagccttaaaaaggaaaggaattctgacacaggctatagcatgggtgaaccttgaagatatgatgttaagtggaatcagccagtctcagagggacaaacactgtctgattccactcatatgaagcccgtatagtaattcatagagacagaaaatagcatggtagtttccagggactggaagataagggaatggggagtgaatgtttacaggggacagggtttcagtttgggaaattgaaaaagctctggagaggaaaggtgatgatagttccacagcaatgtgagtgtatttaatgcaccaaactacacactcagaaatagttagggtgggaacttttatgttatgtgtattttaccacaattaaaattatttttttaaagcagagaaactctggcaaccacaatgagagtgacaccagctcctaagaagggtcgcgaccatgcaacgtgaacagaattccatgccccgacgctggccctgagcggaggtcatgtgcaggctgcagagaggcccctggctgagacagccagccaggaagggggatctcagtcccacagctccaaggaagtgaagtccaccaacagtccagaacagaaacccatcctcctctggagcctccagaagcaacgcagctccgcgcccccctgattcagcccagcgaggagacccactgagcacttcccacccacggaactgtaggaaggtaagttggtgttgctgagctaagtctgtgctaatttgttaaggcaacataaatattttatagcattcaggaaataatactactccaggaaagcacagcgcagtgcagggagtggggtcagggcccggctcagccatgaactgtgcagctgtagggcacacagggccttggtttccccatctgcataacaaaggggttggcttagaaatggttttcttttatttcttttcctccccttttatttggtggagacctcttgagtgacatcttctgtcaaagccccaaagtgcgtaccagatgaaatatgtttaaaggcctgctgtgcttggagtgagtggggatctggttctgcctcctgggtacccttcaacccacccctgggggtctggtacccccagctctgcagagccttggtgtccaccagcattgtctgcagatggccagcctgaggtttctgggggcctgaggtgacccttgggtttgtttgcttgacaatatcaagcttcttgaaacacagatatgactcccaacctccctcccttcctggcccccactgctcttgggaaggtgaagccccgctgggtccagcttctgctgatctctcagcccctgcccccttcatgccatctgtccctgagcttcagccgtgtgactgcctctcagaccttgtgctctttgttcttctgcccaccacagggcctttgcacgtgcatttccctgagcctgaaataccatgctcacccctgcttgcccaggcccctcatgaacctactgctcacctcaccttttccttccctccctgcctaggtcagccttcccctcactctccacccactgccccacaaaccctgttaaatgttctcatacctctcttttgtggctttgactagttacaatgttacaactcctaaaaaaaaaatttggttaatgtctttcttctccactaacataatccaacattcacatagcacttaccttgtgcagaccctattctaagcactttatatgtttgttcattttatcttaagaaaaaaacttctgaaattgatactattatcatcaccatttaacagacgagaacactaagacacagagatgttaagcaatttgtccaagatcacacactagtgaagggaagagctgaggtttaagtccagtctgtctgtccatccacccattcacacacccatctatttatccattcatccacccaccgatccatccatcaatccattattcatctatccatccatccaatcatctatccattcaaccacccacccactcacccccatttatccacccatgcatccacccatgcatccatccatccatccacccatctattcatccatccatccatttatcatcagctccatgaggacaggaattgtgatgttcctttcaccactctaactccaaagtctagcacacttgtaaatatttacaggattataggacaaaccctgatctgtgttctgccataattctccccaggagaatcctcttggagtcaccaggggtgaaggagagggggccttcgctgtctttaccctctcgtgctggtcaaagtggcctccagctgagcatcttagcagccctagagccagcacatcctctccatgtgctgcgttggggaaccccttgcagcaagagttgacaagaatggggtgagggtagagagatgagcagagaaaaggaacttagtgttgcagctctgtgcacgtaagggctggtgcagttggcaaaatataaacaagacagaggacaggcttaggaaacgcatggccaagggcatcatacagggaaactgggtgaggctccatgcttccaggcccacagccccgggccttatatcagcagaagccccacccttgttaaacctgaggggccttggaagagcccacagccagtctgtctgggcacttgccgcagaacccacacctgtctgggctcccctgctggggacagtgatgttaaacagtggcctctgatgagcacagtgttcctgttgatggccctgcctctgatatctttgaggggctgggacagggctggctccgaagtagagacaaagagaagagccttcccccaactctgcattcctgagccccaaagcagcaggaagagtctcctccatttcctccccaagacaaaaccacagcccacgtgcacgggaacggagacacccaaggaggagactgtgccctgtgatggagaagagctaggtgtccacattacattctgcacagacagtgatggagcctgctccaaggtacaggctctttcaatcctctccttaaaaccagatccgtggaccctgcacccatggttatccgtgtcagagtcggggccagcccttaaacgcatctggatggaagagccatgaccaaggagccaggcggatctggtctcagtcatgttccaagccctgggaccctggtccaactgctgaagctccctgtgccccattttgtccgtctgtgaaacggggatgcttttggcacctaattcatgcggctgttgtgtgtacatgatactgcggcctacatgcccggcacagcacctgcccctagcaagtgttctgtagacattagccatgttatttttaatgagaatactcttggccttaaactgtaatttttatacccgattcccccttaagagagtctctttcagccccagctgagacggaaatgaggaaatgaacctgacatccactctatacatccctttgatgagagtcacccttcaggaggagagacctcattgaaatgtaatttttttcccattaatcatccgcccagacagctctcagttctccaattctcttaagcaaataacaacgaaaaaagaaatcttttcttcaacctctaagtgcagatttctataataaaaagcatggcattgaagcagttatctcctctcatctggttttccctttcataactcacaaaggtttctctctctctctctctctctctctccccccgcaaccccatctctctctctccccttgtcctcgccatcttcctttctttgaggccagatgcacgcatggaagagatagcatcatcgtaggccacgacaggtctccatggagtccaactttgaaaagccaagcaaccctggcttggccccaacccatacaatttccccgggtgcttactccatgaactcctgattcctcagcctcttaaagtggggataataacactaacagctcaggctttctgatggttggggactgccattgttgaatgcatagattcaacaaatattgactggatgtctactgggtgctaggaccaagggatctagccatgggcaagatgcagtgggaggcttcttggcactttctttctaggaccagtcctggaggaggcattcttgaaatggaaattgcagagtagggatccccaagacatctgtgactgattaaaaatttggggtccccaaccctatcctcaggcttaataatttgcttaaaggactcacagaactcactgaaagccactgtactccatcacagcttgttacacaacataatacagattaaaattggtcattggaagagacacatggagcagagcccagggaagttccaagcataaaaattctagttgtcctctcctaagtcccagacagcactcacttttcctggcaatgatgtatgaccacacatatggagatatgccagccagagaagctcatgtgagcctccatacccagagtttttattggggttcaggcacatagacatggatgacgcctatgtgactggcctttggcctccagtccctccagaagtcaagttggtactgggtgacccaagacccccaccataaatcatactgtagacatagactatcttgtgtgacctaagatcccccaggtaaacaaagacactttcatcagacaggacattccaagggcttagaggccacctcccaggagccagggacaaaggccaaaccctctctggacagtgttaatttttcactgcctgtaagtttagctgcaaaatcactcaagatgtgaacttcactctgatctgtgtcttcctcttccagccaatatagcgctactgacacaggcatgcaaagatcacacacaaagaaaagcgaaggaaaaccatgcaaatgctcagcaaatagggacatttaaacagagcaaggtgcatccatgctgagggatacagagcaacggacaaaatgatgaggcaccgctgtatggtagctctgtatcatagaaagaaatgctgttggtgaaaaagtccattgcagaacagttgctattgagtaaccacttggccctgggcaatttatttaaccccttgagcctcttcaatttccttatctctaaaatggggcaatgctttgatctcctacccaggtctgcggtgaggagtaaatggagccacgtctaagaagcagctggcacacttggggctgagcctggaccagctcttagtaccatgacttcactctcaagtcattggggtgaggctgcagggcacagggagactcttctgaggggctcttcttggagacatttgttaccaggcagcagccttgaccactcagacattcattattcatttgatagactgatcaatttgttcatttctccataataaagccctgtactaggtgttggcttttgaggagtaatgaagccacacaaagtctttaccttcaaggagtagccagtccagggtggaagacagactgcaaacttagccaagaagtggggtgcagcagcccaaactcacatagctagtcccgaatgccctgctcacaaatgagacagatgcaaagtagacgttccaccaatgctgtgttgaagcgaggtgggctgagcggatggggcaggggccaccattgtgtctctggccaaaagggctgcatgtgaagtggcctagacgtctggtcatgagagagatcaaaacttcaaggacgggagaagagtcagggtggttggagcagaaagtccacgagaaagcgagtggaaagaggtggtcgacaggggcccaagggacggggctttgagggccaaagtgaggagggggactttaccccaaaggtgatggagagcctgtgaagggttttaatccaggggcagcacgttggatccatgtctgcaaaagatgctcttgctcacggagcaaggaaagacaatgggtgagagaggaagcaggaatcttggttagaaagcacctgccatcatccaggcccaagaggcaatttgggccctgccacagtctccttcccaggaaccttcgcttcctccagctgtcttgagagttgactgctagtgtagagtgtgctggagccagctcctcctggcctgagagaactcattgttaaatattcaggaaatatgtaagcccattgttaaaccattggtagctttgcaattagcatagagaatgtattgacaccacagacattggcaaaagctataaatcagcactcttcctcctgcgacccctgagagctggtttaccaaagcatggatgcttctaaacactcactgctgtcgccttctctggaaaagtgtccgtgactgagaaggtcctccttgcccaccccacaggcattgtactgactggcatggggtttgaatgctttgcctcgcagctaacatggtttcaactctgtggcgtcattcctgttccagggctccccatgggactgtgctagactccagctaagaccaatccttgcccagcccctttctgccctcactgcctttccagcttctccttagagccctccttcaatacatgccttggatgaggatctcacaacatttggccaaatgtggtgcccagaccacttgtatcgtggtcctggaatcccaccctggacctactgagtcagagcctttggatttggggccctagcacccgcctttgtaacaaaggctctttgaaactagtgtttgagggagcttggctcaagttagagaaacagaacgaagacctgcagggaccgagcagccttgaatgggggacccgaaagaggaaccccaccctatgaatggaccccaggagagacactaaggagttggattttattgatgtaaagtagcaaatattcctgtgtccccaggaagggtgaggttctatgccaggttgggatgagattaccgaaatgtttgagaaagaaagagctcttcccgctgagaacaccgctcttaaaactccacctccccatggcttcacatcagcaaagcccagagatcgcgccaaccacacatggagaccaataggaccaagaaggcagatctgccgggattagggaagaacttgaacctgtggctgcaaagttggcgcttggcagacactcaggatgctctgcttctctccaagatctgggccttctttttgatgacaaaagttgccttagccccagctcctaagcacttagaaacaaaataaaattaagttttgaataacaagtcttgagttgttggggtgaggtcactgttgaaccactgtgtcaggcccaaagaatgtttccattgcccgccgcctctcgggtgaccccctcaaaggaggcccgcctgctacagcaggtcacaaatagagggcaattaatttttacaaccctctgctctcagcggccaccacatgctggggtgaggtcactcttgccactttatttttatctgttttaaagatgttggtgtcttgagactcacacttccccagcgagctcagatcccctggttcacaagtggcagctctgcagagctccatggtgggtgactgtgggtgacagcaaagaccaccacccaatattacgcaatattacgtgagctcagacgagttccttcccctctcaaggccttggttttctcaaccccaaatgctaagcatcgactagactagcagttcccaaatttcagtaatttctgaaccaccaccatcattttggcctgacctaccacctgcactataattcaagtcactatttttcttttcctgtaaatcacctcacatttctaattagacatttaactaaaaggaaacttgagatcattatcataaatggaagtcgacattccttgccattaataaaaggtaactacagagataaataccttgaccacaaacgagcattgctaaattccagccagatactgctgcctgctgatggcttcaagcctgaggcctctctctctttgttcaaaagggagcttagaagtgtcaggaggtgctaaagactcttagtgccagatgaagaattttcctttgatctaaccacaggggaataattttcacactgtataaatcgatgccctaaaatctcaaatcaccttcccctcaaccagcagtttggttgaagaagctggaaacttgggaagacactggtttaaacctttcctacaaatctttacttttgagtgatgatataaagctctagattgcttctggagctttcttgcaagctacacagcatttggccaagtgtggtgccaggaccacctatattacagtcctgggaccccaacctggatctactgagtcagggtctttgaatttgaggcccgagcacccacctttgtagcaagggatctttgagactagtgtttgagggggcttcacccaagttagaggaacaaaatgtggcacttgtcagaaggcctgcgggaagagaccagccttgaatgagggccccgagagtgaagcaagaatccactctggttagtgctggtggtgtcggccgctatgcacttgtgaaaataaatgactctcttctggataaggtagagatgcctggtggacttattccgagccagagaagacccagcaaattcctctgactctgtctcagaatggtgtggaatgaactccaccccatggaccccaggagagaccttaaggagttggattttattgacatcaagtagcaaacattcctgtgttcccaggaagggtgaggttctgtgccaagttaggatacgattattgaaactcttgagagagaaagagctcttccctctgagaagcatcaacctagagctgtgagcggggctggggtgccgcgctggccctgtctctgctcttgcgccacggtgaaaacatctttcactgggagttgtcagctctgccctctctgccaacagaaacttggaagcagccgtgcctttctgcctcccgcttgccttcccagcaggtctgatcaatgtccgttttaaaccaggacatttcgtctcactgtggagcctgtgaacacagggcactgtggagcccagcttctccttgttcattgtcgtgcagggactgccatttggagagaaaagtcaggttgggaggctctgctgcaggccgcctctttgaaaatcagatgaattccaagcaagggcaaagatgatcgtgtatcctgagaggttccaagtctctgtgcctcgcctcctcatgtgaggcaaggtagccattgtcccttcctcataaggtggctaggaggaggggataaagtcaagtctacgaagcactgagcacacacacacaaaataatagaagctgttctgggaaagatagtgtccctcccaaaattcatgcctccccagaacctcagaatgtgggcttatgtagaaatgcaaatgtaattaggtcagctgatatcataatggatcagggtgggtcctaaattcagtgactggcacctttatgagaggaaagggctgcagagctatgaaaacacacaggagaggagccacttggcagtgagtcagactggagtttcgctgccataagccaaggagcgtggaggattcctgagttgcgtggaatggattttctcttacagtccccagaaggagccagccctgccaacaccttgatgttggacttctggcttccagaattgtgagagaacaaatttctgttgcgttcactgtggttctctgtaacagcagccctaggatagtaatgcagaagctaatttactgagcatgaagtaggcaccaagcattttgttaaacacattacagacgttatctccaatccacccacctgaggaagttgatgctatcatcacttctgttttacaaatggagaaaccgaggccctggtgctcagctgcccaagtgcacccaggtaagtggcagacctggaatttttaaacccttgtctctctgtttccaaaaccttgtttgttctagtatcactcagctccatgaggcaagaactgggtagggctcttgttttctaatggatctcacacctggcaaagttcctggcacatagtaggccctcaagaaaagtgtaatgactgcagctgggcaaggtggctcaaacctgtaatcccagcactttgggaggccgaggtgggtggattgcctgaggtcaggagttcgagaccagcctgggcaacatggtgaaaccccatctctactaaaataaaaatacaaaaatattagccgcgcgtggtggtgggcaccgatagtcccagctacttgggaggctgaggcacgacaatcacttgaacccgggaggcaggggttgcagagagccgagatagtgccattgcactctagcctgggtgacagagcaagactctgtcaaaaagaaaggaagaaaggaaggaaggaaggaaagaagggagggagggagggaggaaagaaagagagagaaaagaaagaaagagagagaaagagagaaagaaagaaaagtggagtgactgcattctgtgattctgtaaattcagaggatttgggaattttacgctctttactgagctagtaaataaacagtatattgaaggcctgccgtgtgccaggcacgagggacacagcagcaaataaaacagtcatggctctggcttcgtggagttcccagtccagcagtgggacattgacactgaggaggtgaaccctgagagaaagcaggtggttcctgtgccggtcgttgtgctgagtgctgggaaggacctcacagggaaaagcagcacagaggagctgaggacgccgtgtgacagaaacggtgtcattgtgatgcctgggattctctccaagggcccgtgctgcatccaggactgtgagggcctggagagcagactgtcttgagaagattctataaaagtctaagagttcatccatttgattagctgtattgtttactctttagaaaaaaataaaaggaggtctgggtttcttcccttggcctctaagacacctgaccttgcacccagggacttccaggttgggctcttggcaacaaaagcgggggccccacagcgacggctcctccagggaagaggttgtgctgctcagcctgggcctcccacactcccctgggaacaggtagcaggtgcagacagccagcccggagcctgggaatcttgtccaggaccacagccaggagcctggtttccagagcgtccccgcttcctggggtgagcaccctcctccctgctgatctccaaagctgacccctgaggaagttctcaaagacgcagcccctgaatcggaaggtctggtagacgaggtgctgtgatgtctgcgcagggtcttaacttcggttctctaaaggagagaagaaaggaagggaagaaaacagccggaaaaagaaacaagaaagaaaacagctatttatcttgatttttatttgattataaaaataacccaagtttgctctaaaaaattcaagcataagacaatcagttggtctttagcctttggtgagtataagaacctagtggggagatgatttaaaatgcagattctgcgggtcctgtcttggggtgattccagggtaagcggcttatggggtgcacgcttagaagtgctgatatagaaagtatgtgccgggctgggtgtggtggctcacgcctgtaatcccagcactttgggaggccaaggcgggtggatcacctgaggtcaggagttcgaggccagcctggccaacatgatgaaaccctgtctctactaaaaatacaaaaattagccaggtgtggtggcaggtgcctgtaatcccaggcaggagaatcacttgaacctgggaggcggaggttgcagtgagctgagatcatgccactgaactccagcataggcaacaagagcaaaactctgtctccaaaaaatatatatatatgtgtgtgtgtgtgtgtgtgtgtgtgtgtgtgtgtgtatatatatatacatatatatacatctatatatacatatatatacatatatatacatatatacacatatatatacatatatatgtgtatatatatatatatatatacacacacacacacacacatacatatatacgtatggtcagaagtttgaggctggtctcgaacttctgacctcaggcaatccacctgcctgtataatccacacatgtatatatacgtctatatttatgtatatatatgtgccgttcctttccaattagaagcattgagcagggagagaaagttccaccaagaaaagactggaaggatggtggacccccgggagagactgcaggagcctgtgcctgacgtcctgcctttctgcaaggatcctcttttagctcagaaattctgctttgggacaggacccagagtggagtcagatccaggtcaagtcactcagaggttgttgatgtgttagacgtgaggtgctgtgagaagcgtggctggacagcatttaaaacaaaccagcgtgtcagaactcaccaaagatcaggatgctgcccagagctgttgataagaacctagccggaaggggagtcctaggaagatgccggcatcaaccatagagcaaagatctgcaggctggagattttaagaagtttctaaaacttttattgttgttacaataaaagttacataaaactggccaattaatgttagtgtcaccagagctaggaatttctccttagaagctcagagcttgtttctggtggcataagtgaaaatctgtcacattgtcagctctgaatgttcatccttcaagaatgtggctgttccccactctaaatacaccgtaatcattctgtttggtccttaaatgagcaaatcatcttcatgggtttcttaggccaagaaatgattgatcctatatcatgagatcagaaaggcccaggcatgtttttggaaagttcagaatactctgcctacacatgtcagctgggagggcttagaaagagttacctgctgcaacatggacaaaccttgaggacattaggctaagcaaaataagccactcatgaaaggacagacgggataattctgcttggaggaggcacctaaagtggccggagtcacagagacgggaagtagaatggaggttgccaagggcttgggggagggggaacggggaggtattcaagccaggccaaatttcaattcgtggtgatgaaaacgttctactaggccaggaacagtggctcacgcctataatcccagcactgcgggaagccgaggagggcaaaacacctaaaggtcaggagtttgagaccagcctggccaacatggtgaaacgccatctctactaaaaatacaaaaattagccaggcgtagtggtgggcacctgtaatcccagctactagggaggctgaggcaggagaattgcttaaggccaggagatggatggtgcagtgagctgacatggcaccactgcactccagcctgggtgacaagagcaaaagtccgtctcaacaacaacaaaaaactcttctgatggaaggcagtgacagttgtacaacaatgtgaatgatgtgaatgtacttagtgaccctaagccatatgtaaaatcctgtgcgtattttaccacaattttttaaataaaccttccccaaatctacaaacatgacatctttgagatttgcacaaagcttccatctacagtgaggaagtttcacctcattgtctggaagccccaaccactaaaaattggggtccgaggttctcagtttcttgtcaccccttcactgctcccccacccttactagcctattactgctcccactaacactgccctccaagtactaggcccacagccacagcggcccggcgccgtccccactgccgctctcgagaaccagccatcaacagctccacacaagctctcttttctgttttaccaacagaactgggactggacgggtttaaccccagggctctggcagtttccatttctctgtgttaaaaaagcttttagcctaaacttaagccaagtatgcctccaggaaatacttgcttcttccctgtcccccagggaaccaggcctggggccagacgaaagaagcaaagaaaagggaatttatgcactgaaaaaactggggcaagaaggactgccagctgttccggccacagcctgtcccatctttggggatggtgctggtccggtcactgtgtaggagtgctagactgtcttgtgcatggagaattgggaagaacgtggacctggagtcagaggcctgggtgctggctctgtctgaactggactgagaaggataaagggacactcgctggaaggatttgctgatacagtccacacagaggctctgcctgtgtgcacacagatcagaatacgcacttaatgagtggttatgcccacgaagaagaaaggggagaaggaggagacagaggaggaggtggggatggaaatggtaacaactctctcagccaaccctcagatgagtcaagctggctactgaggtcacaggagcccaacccaaagtagctgagaagcaaaagggagtttactggttcattttaaggcatttttcagaagtaggtctggctgcaggcacagctggatccaggaactcaggctctgtcttctggggtctttctccttctcgcctctacctacttgtactcagcttctggctctcctccatcaaaaaggctcctgtccttcggccccatggcggagacagcagcccctgctattctaggtttgtgtcctcccagtggtaggaacaacacaaaaagcttcttcctgtctgtctccaagcacagcaatttcagggaatactgtttctggcccaacctcttgacaagagggatggggccataatggcttaggtcaggtcacctgccatcccagggggtacagggaccgggctctgtgatgacagtcccagaagaatcatccttgttctccaaaggaaagggacgtggtcctacatcatgcaaaggaaggggcagacccttcctttcctttctcttccttccactgccccacccttgacaccccacttcccagagaccattaagaccatcaggtgaccaactgccaggtgggaaaggacctgaatgacttaccagccatttgtaccttcaagtgaattcatttcagggggttgctctcatccctctcagttaaatggtgttcagatagtggaatgagggaatggaggagatactggaatgtggctgaatatttcatcgagaagggaggccagctttgtgttttgttttctacaccgtcccagtgagcctgctccagaccaggaatgctcacaagcacctccaccgttcatcctgaatggctctggaggtcaaggctgggaaaaccgtgggaaggtggtttgggggtctcccttggtctaccccaaggttttcccgggggcagcccaacccaagcctcctgtgaagcggaagccacttccagcacaacacttggagcgcttggagcaccttgtggccgacatcgaatgtcattcctgccctacatcttcgctgcattcatcaacctacattttcactgcattcatcaatgccttaggtggtcacagcacccgttcctctggccacagtggtaggctcaggagtgggcaattggcctcagccaggccatttggggccctctctgaaaatggctgtgtttgctgttgttggtaaagtggcttttccttttgggtgtggagctgtgaggacacccgtggaggacagctggggtgccccctgactgcagggcaaggcagcctctttgctagaagtggaacagaagccacttagaatcaagtgaggagagacagagaatgatccagaagacacagctcaagtccctagatccagccatgcctgcaattagcactctcccagaattctagtgaaaatgaggtagtacattttcttttttttcttagctattttgcactgggcttctgaacctgccacagaaagactaatggatccaaagattgtctgggaggaaagaatgatctgcccagagtgggtgagagaactcactctaggcaggacccccatgagctgcctctgctggctgacctgacattctcattcaacaatttactgagaatcaggaaaaaacagctgggactcatgagagtcaccccatgggctctgcagccagctgcctgatgcccttggctctgccacacaccagccctatgacctgggcaaagtcacttcacctctcagtttccccacctgtaagttgggtagatgagaggagcttcctcaggctcgtaggctgtgggaggaaaagacagccaccagaagccccctcaggcccatgcacggccctgcacccccactcccagcacgggtgggccgtgcagcactggggttgccagcttactgtccatctttttcctgaactgggagttacttggggccaagggtcttccttgtgccactcaccatggagtcaccccactttcgatggcttagcttttagtcaataacaactttgctaaatggatattgaatggatgctgggactttgcctcatggatttgcaagtggtttgctcaccagagaaacacagacacgtgcccttcccaggatcttttcattcccacccccagtgcaacctatgaggtcatcatttctctgtaagaaggcacagtgaacaacctctgtcaggggcccagcttgccggtgctgagagcttccatctttcctgcccacctggtagttgtctggaggcaagggtgttgtgtcattcatcctaagagcacgaggcagtcctgggatttttcacccggagttcccatttctaaggagttctctgagttccctggtgagagaggggcccttgtagagacaagcagaagctgtagactggctgggagcttcgaaggctgtcaggcttagagatgaaagtggcctggctgggaagaaggcagtgggatgagagtgggccagccaggacatgagtgtgagggatgaggagtaccccaattctggacccagcctgcctcacacaacagggcactgccacctgctgactcaccatcactggcaggttactcgtgttctctgtgcctcagtttcctcatccttaatataatgctgatcatagagcctatctcatagggctattctgaagatcaaatcaattaatatatgcaaatgcttggaacagccatcagcacatggtgagtgcggtgtgagtgcttccctccatctttattatcactgcctcttcatgtggggcacgactaagaggcgctgacgtcctggatcagggaccttgtcattcagagctctacccccggggggccaatagacagtggggagctctccaaatgctggtgctacagaatcgtaaggagcagaagcagctaatggtgggaagccccccgaccccgggcagccagagccttcctccgtggatgacaggtccactcagacctgaccttcctcctaagtggctacacaggcttatctcggggacactaagtgctccctcttctatttgctgtagagaacaacagtagaaattgtaatttacaggttgtctgcaaattaccgcctggtctgatttataattcatagtacaatatttatttctaacaggaaattaattttggaaactcagtgggtgattaaattaaattgcaaaaccattccacttgcttgggaggaggggagtgagtaactggagattatattaagagataaattgggaagcatctacactcagaaaacctgagataggaggagggaaacagttcatccctactcgaaggagatggccgtcttgtcaaacatttattacagaacatgtgccctcatgctttggggtctcacagttacagccttttctcagtggatttgtcattaaggcaaagaaaaataaaggctgaattgactgtatatccaattcaatggcactttgaataatgagcaatcctagggaacaaggtggaagctcatagcattttcatgaccagtcttgggagccacacagcatcatttctgccacattccctaacactccacccaagctcctcccactactgaatgggaggagtgtcaatgtcacatttgttagaagagcaagtggggtggaatgtgttttctttgaaaaacacaatctgccccagggtataacatcttagacaagagcctgacacatagcaagaagcaccatgaatgttagccattccttctgcctgggggacgaggaaggtcacctggaggggatggtgttggactgggctttgagcagtgaggatttccataggcagatgctgacttgggacacctcgggcaaagggatcagaatgaacaaaagagagaacagagagaaaggcttgacagaagctgatggcccctcctgtggggagcatcgggactatggaatgtggggtgagagatttccaggagacatgaaggccaggcatccaggactggaccttggagggagcccttgaagggaaagtttttgaatctgttgtaaaaacctttctgattttggagtgagaagcagccctagaggtttattccacctcttgtttattcattcaacaattttccatgaaacagtccctagtacatgccagatattggggaatacactgctgaacaaaataaacatggtgcctgcctgcgtagcttacagtcttgcagaagagacagtgacaaagcaataggcgaattattataccatggcagattcttgagtgttggcatggagaatggcagggagacaccttgtaagggactctgggaaggcctcctgggtgctgacgttttggctgagttctggaggataaaagggagggtgggtggagatcagctagaagaggcatccaagtgggaggggatgtggagagaggagtgggcaaggcaccgaaagccacccatgtgcctggaataaagtgggttggaggaaggggagggtggggaacacaaagccaggcagggcctatcatgggggtcctttgtggtcacagtgagaaccactgagggttattggagcattggtcacaatgccatccaatttaagtttttaaaagatggctcaggctgctgaatggaaaacagatcaaggtgtgggtaagagtggatgaaagagacagacccctgggatgtggtgagaccttggaccagggaggagatgaagtccaggaatgggatccaagatgcgttttggaggaagatcttatgtcacctgctgatggatgggaagagcaagtgaggaaaggtctgggacatcaaaacgactccccagggtcaggttctgccctgctgtgccctgcagggatgcccactgagatgggcaagggtagctttggaggcaaccccagagcaccatttggatgctggccttgctgcgtgccagaggcattatggagagggcaggtggatgcctgggtctcagacttggatcttatcactgacttcaaatggccttcatggtggttttagagaagaggaaattgtgcctgaagttcgttgggaagactcactcctggacagtgtggactggggtgagaaatgagcgagaaggggaggtagcttgaagggtgctgctttgagaagatgagaggacgagggctccgaactctgcccgctgccatagggaaagaaaccccaagtgcgtcaagagccgaggagctgaccgtagttggcccagggcctcagacgatgatttcccaaacaggatcaaagagctcacgcacttctaatcaaataagttcatcaaaggggcagctaatagcctgaataccaggggctgttccactgacataattttttattgtgaattaattctattttaaatgtcccaaagaagcactgacaatcgcaatctagtactgtggagagagcagtggatgggagctcagaaaacatgagatctactctggctttactgctagccagctagacaccttgggcacataggttcagtctgtgggcctcagtttccctcatctgccaggccagagtaaaattgatgtatcgcttagcagagcaatattgatacaaaagcaccatctgtgagctcatgttccctggatactcaccagctagtgcagtaccatgagccacggcaagcaacttccctcctcagcccagatgggacgggttaggaagtgcctaggagccaacgtcctcagtcaacaggacatgggggttgggaaagcatgtctgaggcatgccctgcaccatctcccaggggtccccagtgaaattgcccacggaggtagcaactccacagccagctcattacctccctgtgtatgtttccttccatttcttgtctctgttcctaacaccccaacaggagcttcctgggatcaatatccaaacaaactgcttgcaccaaaagcctcaatttaggagctacttctgggccagactcagacaactacaagctccaaattcagaaatcagaagatatgaatagtggatgaggctacacacatgtacacatgcatgcacatacatgtgtacagcacatagcatccagcacaatgcctggccctccacagacgctcagcaaatattttttaataaatgaataaatcaatgaatggctttcctttttgcagcatgtgcctcaagtccccagcagttcaggacatcaaacagaggtgtcagaaagcacaggcaggattcctggggtgggatctagggtcattccaggagcctgtctggggatgggaagggcagggagccctcatcttccactctgcccctcccagcagtcccgccagtctctgccgggggcttccctcccccaccagctctcttgctgggccccccaccccagcccatctgttcagcatgtgtaagcattgtcaaattgtttgaataaattgtcactccgattaaaatgtttatgtctgcaggatgactcgtttctgctaaattgtacccaaatagtctcacatttgctgtagatatttgacatctgtgtctggtctccccactgacgaccagatggagagctggatccacgcagaagctcccttgctcccttgtgcactcatcactcacaacctgaagccactcagggcttgggccaagtgggtgggagggaggatagactgggtgtcttgcccaccctgcccttgacaaacctcatgggtaaacacacacatgcacacacacaacacacgagtttaattttccttagatcagacttagatgcaagatctttagtgcctcttggtcctaaggttggctcaaaaaattaaaaaaaaattcagtgccttctcaaagatggtcgatgtttactgtatgttaataagtgcagataaatgacatcccaataagaatcccatacacccctgggatcccagactcagctggtcaaagcaccagcacttttgcaaagtacagaacttccttgtgatagccctcactctacaggatgggtggctgtatagatggaaagaaggaaggaaggaaggaaggaaggaaggaaggaaggaaggaaggaaggaaggaaggaaggaaggaaggaaggaaagaaggaaggaaggaaggaaagatgaatggaagaatggatgggtggaggatggaaggatggatggatggaggatggatggatggatggatggatggatggatggatggatgaatggaaggctggatggatggacaaatggccagatggatggatggatggatgcatggatggatggatggatagatagatgaacctaataacaaacttaccatccatcgaatgtcagctggtgtacatgcagcatttactttctttatcactagcaataattagtgttctattattgcataacaacttaccacaaacttagtggcttaagacaacacacatttgttatctcacagtttccatgggtcaggagtctaggcatgatttagatggatcctttatgcagggtctcacaggctgcaatcaaggtgttgactgggctgcattctcaaccagagacttgactggggaagaatctacttccaaactctttcctgctgtgggcagcactcatttcttttcccagctccttactggttatcagttagaggtcctagaggcatccaaagttcccttccatgtaactggctttgctggcagttcacacgtggcaacttgcttcttcaagaccagcaagaggttctctctccagtctgctaagatagagtctgatggtggtcaccctagaagaaacatggcctaggggaaggcagcccctgccactgaggcagtccccacaagttctgactgctgcagctggctgctgatagacatcccagcagctggagcagttagttcttcatgggggtgggatctggggatacacttccatacccaccacaggtaacacagctgcccagagtaaaacaaaggcaggagtagtcctgcatttaggacagctgtgagctggataagcccagcccagagaagcatccactggacctggctgtgtccagatggcatctgtccagacctgtgctgtgatggatgtgttctttttcaatgtcagctgcaaccatttctcatgcaggagaaatttccacctccctctgtctctcttctctaggcaattgcaccccacaaggccagagatctgttttattgagcatctattacataccaagtactggagagtgccactccctcacctatcagtgctgtctacatggcctccttgcaggggacagtaagagttagaggggacagtgcatgtgagaagttcaggacagcatttggcttgaaataagcacccaacatatagcagacagtgatgtgaatctgctcccacccaagacacccccgacagcctccagggcttttctctcaccacacttcctacatctggggctggtgactctctgtgggggctgctctgtgcatcctgggatatttagcagcatcctcagcctccacccgagagattccaggaacaccccctacctcccccattttgacaaccaaaaatgtctccagacattgtcaaatgccccctgtgggggtggcagaatggtccctgatggagaaacaactgctctggcagaagacagaccaagacacagggcaggccctggagagacgtgtggccttctcagagaggcagtccttggcctaccctcaggtctgggtaggatttctgaggtgaggaggaggagagagaaaaattccaggctgtgggaagagcacaggagccggggtggggtggggatccatgctgctggcagtgtccaccccaagtcgggacacaggagctctgggctgagtcattatgaagaggtgtccatgatcaaatgcttagctctgccttggcccaatcccttccctttctgttgttttatgtccccatctctttttttcaccattcccttttaggaatagtcacctaggagggcttccccaaacatgtgcttcctaggaccctgatcttggagacgccaccttacttcaaggatctctcactgtacaaagcctctgctggcccctcgggcagccagacactgcccccagctcctcctccccagcagtgatgtccagtccaagcaggtcgtgggcatccatcctgccaggccactccccatggagatgcccacctctgggagtgctgtccccacactcattttgggtttttccgctgcactattcctcgcgccttcagctgaaataacacaggtgcctgcctcttctttcctgctctcccagagaagccaaacatccacaggagaggggacatggagacagccagggcccttgtctgggtcctgccctgcctcctctgcccaggaagcctttgaatctgtttatcctcctcagccggccagggtcaggccaccaggtgctggctcctgccaggcccatcagcctcgccaaagccacagcttgtcctgcctgaggccaggggcctgtcctctgccagcttaaacccttcaaggccattctccagtgcatccaaccagcttctgccttcccatccactctctcagcctcccacccacaatggcagagggaacgtggtggccagggcagaaaacaaaccctgactcagagcagggtctccctctccctccctccccacatttatttggctgtaaatttttcaatttgtcctccagcatagattctggatatgagctcttcctgtaggagaacccaccctgattcttgcagatgcctcttcccaggtgtccatgtgagtccttcacccccgagtctgccatctccacagccagaggggccctttgcagatggaagttaagtcccagatgtcacctctcagctcatgatgctcccgtgcatccgcatcttatgcagtataaaagctgaagtcctggctatggcctcggtcccatgacacccaccccctgccttttcccacactctgactgcactctcccagagtgctctgtcccagcccaccagcctccttgccagtcctcagatgctgggtccactctcccctcctgacctgcacacttgctcttcctccacatgaaacaggctccctgttagaccagcgggttactcccttgttttctttagatctgtacaagcattttgccttctctttgagactttttctgaccaccttatatttaaattagacacactctattatcaccatcaccaagaccatcaccaccaaccatcaccaccataatcatgacaactaccagccaccacaaataccaccatcactatcaccatcactatcactaccaccaggaccatcatcaccaccataatcatcatcacatcatcaccatcaccaccatcacatccccaccaccactaccaccattaccataaccattaccatcactaccaccaccaccactatcgccatcatcaccactttcatcatcatcatcatcatcatcttcttcaccatcataaccaccaccaccatcaccaccatgctgtctccccaccttcatttttcttgataacacttccaccacctgacagcagagaaaatccagtcgccacatgaatgctcacttctaggaaaaaattcacactcgaggttcctcttgttttcctgtttattaacttctctgggccaggagggtctgttcacaaagggtaaatgtccatgtgacctgagaatcttcatagcagctgctgatggtgtgttccctgagtgccagcctctacacaaagtgcctgccccaaccgtcccactaagtcctcgccatagtcctgagtggtcgcgaggagtatcatcctgggtttgtggataaggacaccatctgtgaaatacattgaaccctcaggcactcaaacccacagcagtggaatggcttccctgcacctcaagtccaacatgccatctaccagcctcagagccagggagggagccctttgtgaccacaggagaaagtcttgcctccaccaggctaagcccaggccccctggctgggacaggctgggatctgagcttcctggggcagcaaggctcagctagggtgttgggggctgggcacgatggaggcctccctttcgacacacttgagagagctcaggtgtgatgttccagcccccaagtctcgattctcagtggctttggccagcacctctccagactcacatactccaaacctgttcaggcctcctgggaatttcttcaaagctgagaggagagctccaggccatccagagcaccaagggagctgtgctccagggccatctgaggccatgaaggaaaggaggaagccagctgggaaacccaagttttatctgccatccttgaggtgtctgaaaaccaggcgcggtgatctgagttttgcaacactgacggcctgcatgtgtgtctgtgtgcatgtgcatgtgtataagttaatgtaatatgtaaacctcattaaagatatgcaggcattaattatttaacattgtagtggaaaatgtcttcatgtttcttgacaatgcattacgggaagacttgggattactaagcaggaagtgggtgcagtactgtgccaagcgtggagtgtgtgttcattctctcctgccatcctcaccaccacactaggagtggccacaacaacaccccactttacaggcgaagaaagaaactgaggccaagaaatgtaaatgacacttgagattgcagagttggtgacgggcagcacggagcctggaactcaaaccgctcccctctagaatccacagcaccatggccaccccaggctgcccctgggtcagggagcccagctcccaggttggcctaggaaaggcaggctccagtgacccctagtttgagaagacttagctggaagttcattcgcttccccaggcccttccacgactgcaaggagaaagtctccatggagtgggagcatattttaacccttttctgacatttgaattgcaacaaacatgaaaaagggaacctcatgttcagaacctttgcaggcaaccatctccagccagccacacgcataactcggctttgtcttcatttcacttatttttaggggtactgtctatttgtggcatgtgatactggtttcccaaatactgtaattatataaaattcccatgttaaatacacttattggacttaagaaagcaaagtgacttaatttaaagaaatttatgaaacaagtgataatggtataaaaataattggggttgatgcaactctattctagcccaaattcagcaataataaactatcggctgccaaggaagggggaaaccttgccagtcttcaaggactttatgttctggttcaagggttctcacctgggcattactgacattggggccaactcattctctttaaagggtgggcaggggctgtcctgggcatcgtaggatgtcaagcagcatccctggcctctacccactagatgccaggagcacccctcaccctctcctgacagccagacatatctccagtcattgcccgatgtccctggttgagaactgctgacctagttgcaggtggcaccctgaggaggcctcagacacccgctctggctgtcgacctgcagaggaacgcagcggaaaagctgcaaagggaggagggcgagcaacagtcccatccacccacctccccggcctcagagctggcccgggttcctccaggacctgcaaagtccttgcagtaagcagcagaaatgcaggcactgttatgtctttcggatcctgctatcctcgtgggatttctgtagctgagttcccagagagactgcagctgcacagtcaaaaatatccatgccgctgtggatcttggagctgtttgtatgagctgagctgccccacagaagtggggtggggggtgggggggagttgaagttggggagaaattaggaaagaaaaacaacaaaacaaaaaccttcacaaagcagatccaaatgggaagagaaatagaagtataatatgaaatacgggaagggcgaagatgagaggatagttgtttcatcattggggaatcttttaataagatgccaaaaaaaattcagcagaacaaaggagtatgggaaaggatgagagagtgttgactgaggacactttcctgctccgacatgagcctgaaaacgaggacttctcagctttgggtgcctgccagagtcacctggtttggaggcgggagtgctttcaaatggtacacgccccggccttccctagtcccactgagggtgtcagtggcctgccttgttaaagaggcctcatgtgattctgacatgcagccagagatgagcattttctttttttattattttattttactttaagttctgggatacatgtgtagaacgtgcaggtttgttacatagggatacatgtgccatggtggtttgctgcacccatcaacccgtcatctaggttttaagccccgcatgcattaggtatttgtcctcatgctctccctccccatgccccccactctccaacaggccccagtgtgtgatgttcccctccctgtgttctcattgttcacctcccacttatgagtgagaacatgcggttggttttctgttcctgcgttagtttgttgagaatgatgacttccagcttcatccatgtccctgcaaagaaatgagcattttcttttcttttttttctttttctttttttttttttttttttttcctgagacggaatttcgctcttgtcgcgccaggagtacggtggctctatctcagctcacagcaacctccgcctgctgggttcaagcgattctcctgcctcagcctcccaagtagctgggaatacaggagtatgccaccacgcccagctaatttttgtatttttagtagagacagggtttcaccatgttggcaggctggtctcgaactcctgacctggtgatctgcccgcctcagcctcccaaagtgctgggattacaggcgtgagccacggcacctggccccagaaatgagcattttctaaagctcgaaaacctaccaggtgagtctctggtgctgtttccattttatttctaaattgtcttgcttggaaatgtggcatcttttttctttcctgtgatttccctccttctgcttttttttttttttttttttttttcatttttaatgtttctgactgattattgccatttcagggactatgccaaagctctctgaagtagcaaaatcctccttatctctaaatcatccctaagctcccagcaatggcaggcagccctgggcaggccctgcacccagcaacctctgcccacaagcacacatccccccaaacatgtttagaccatgtccacatggctctgcacgctttctaaaggagaagagaggtaagccctccaacccctcaaatatagacaatgatgacgttgagcccaacaaattatagacaaaagtttgagatcagcatgtcagaaagtgggcttggcagaacctgtttggccagatgttcacagatgttgcagaaaaaagggccaaacgtggaaaggctgaacagggttgacccgcaggactcccctgagtctaagctgcaaatgtgcatcccaagcctattctagagccccaaatcccgctcttcccaagtctgtttaactcttggagcaagcacctctcaaggaccagttagttttgcaaatgcagaaaggggatgcctgggcataccccaggaacaagcctagcttcactgagacacagactccttttttccaggctggttgtactcatgcaaatacagcaaagccaccgcaatgcagggccctgcccagtgccctgatttgtctggaccccactgtggtcttagtgtccagcgtgccatccagtctgtctggtccccactttggtctcagtgtccagtgtgccatccggtctgtctgctccccactgtggtcttagtggccagtgtggcgtctggtctgtctggtccccactgtggtcttagtggccagtgtggcatccggtctgtctggtccccactgtggtctcagtgtccagcgtggcatccggtctgtctggtccccactgtggtctcagtgtccagcgtggcatcccgtctgtctggtccccactgtggtctcagtgtccagcatggcatctgcactccagcctgggtgacagagggagattctgtctcaaaacataaataaaaataaataaataaataagtgaatggatgataacactgtgaatgacttcattgtccacacagcagtcacaggtcagatctttaggcaggtgttttgtctgaatcgcctgttttgatgcacgtgagactgacgtctggggcagccgccggggcagtcagggagacagaactctctgacaccgcttttgagctcgagggtctgctcccatctctgacaatgggattcacagcagggtgcaggcaggactgagaatatgatgaggcaagcaaggcacaaggatgcaaaatgctcagcaatgtcacctccagactcatgcaagcgcagggctggtctctaagagcgaggcctccttgcattctgagccctgagcacggcacttgtctcaccctcatcctggccctgcaggtctcaggcagcaggcacaataccaggaaaacagagcttctcttcctggagtgtaaattttgcccaaagacttggcaggggaactatttttttctgttaaaaagatcagagaagaatgcaaaactgaagagtttttaagataaaacatgccccgggttctggggatacaagcccttgttttcacctttagtgggatctgggtagaaatttgaaagaagttccaattaaactgttgatgaaaagattagaagacagaatatgtgcttattgaatctgcaggagacatgcgctctcatcatcttaagattcctaaacatcagagcagagaagaacaatgcactaaggtggcctttgtcctggttaaaattccacgctgcacttaaaagcaaagctagctgcacaggcattgatctaaggaatatgactgagcagcctccgagtgctgggctccgtgctggggcagacgtgcagctgtgagatcaagtggcaaatcacaggcgagtgcctggaggaagagagctgtgacagtcctgttcggatagtttccatttcactcgtccttcaagacccagtggtgactaaaagcctgtaagaagaagatttttgaattgcagataaaccacgataagctccatgtattagaccaggcaagatatgcctcaaggacaactcaacactgcttagattctcaaattctaaattccactgagtttaattatctgaacatgacaacaccatgagggttcactgataaaaccttgagttctagcaatgctgcctcatctgttcattcattcattcttcattcatccttccacgtgtctggcattgttggggcactgagattctccagtccccaggtactgctcaatgcatccagtggtggagacagacaagaaccagtgagtctcacacagagccagcggtattgagggacaagagctcggttgcagggtcagggtgacagtgagatctgttccatgagtggatgacagcctgctggggcaggtcactgaacaagtgctcagcagaagaggatctggagatctgggagagaatctgggagaagcttggaaagcaaggtcacaggtccaggacaagagtggagagaggcactcactttgtaccccaaaatttaaggaaacacaaaaaaactcagtgatcaagataaagaatattttaatgattttaatgcaatacttagaaaacaatcaaaattaatgtgaaacattcatgataaataaaatatcaaaattttaaaatcaggacagggtcccacaaggccaaggtcagggcaaggtgagtgaggcgggtcatgcaggtgcaggtcgaagcccatcttgatctaaaatttttatatcacatattttttgcattaatttttactttttaaatattgcattattgatcttgattctgagtaatttcccacccctttccatttttgcacttgtggtcaatgcctgactctccctaccctggtcccaccctccaaggacgaggggttggggaaggaggcaggggccggaccacagcagaggctcaagggtcatgctccagaccctgggctttatccagcagcattggggagtcacagaatgacatatccaacatgtttatgtgacaagattgcttgggataagaatttggagtgaggggagggaggaccagaaagaagggggtgaaagcagttaggagggagtcatgagtatccaggcaagaggtgcaaataatctggagaagactggtgggaaaacagtgaatgaattggagagcatcaggcagtgaaatcagcaagataaaggccaggacacatggattcaagagcatcacttctaattttctgatggtgcaattcactgcggccatgattagcttggagtgggggtagagaatgggtctggtttttggcctattgaagccccattcatttgcagcattctagtaagatgatgagcagaaggtgggcaggcaggtatgcagtcaggatgatttggctgggtttgagttgaaggaatcggtttgggaggtatcggtgcagaggtggtaattaagggagtcacatcatacaggggacctccatgcagtggctcatgcaatatttgggatatactcaaaaatgacctgctgtccatctacaagtcaagcctaactgggtgtcttatgtttttctttgctacgcctggcagtagccccagtggtgactggggccacaggctctggtgagctcacctggaaagcaagtagagaggagaaggggcctgggaagaagctgctggggagtctggcagctgtagttcccggaccgcaggggaaaccaggagagtttggttttgcagaagccagaaggaaaggtcatttggttactgtgtcaagctgctgaaaaccagttaaaatgagaactgaaggcagagtgctttggacttgggcatatggaggtcatggggtcgctcaccgggtgcttctttgcagagggcaggaagccagatgggaggggcagcgaggggcacaaggagaggcagacaggagcaagttggccatgcggaggtgagagagtcagggcagtggctgagggaggtgggcgcacaggtggagatgggagcacgtccaggtgtgagttgttggtgtctctgaatcagtccccttctccatgcacagcccaggagcccccagcatctctccctggacagtgcccttggtctctcagggcttctggtacaacccctcccaactcatcaccacctattctctcctgtcaccctgctggtgtcattttgtacatccccagtgtcctgttctccctggatagaccccccaatctccagcatggcctgtgggaccctcctcctctgccctcaccgacccctcccacaccaccacccagacaccctgctttgtttcacctccaagccactattcttctgattttaaaataacttgaaaccttttcctggacccctgaaagtctcttacaggcagtgtgcccggagaaacaggccctgcccagggctcctgctgagctgccctgcgttagtgctcactctgccctgcctttgaggggctagtctcgcgcccaacctggccagcaactgccccgggtcacctcctctggctcagtccagcaggccaagctgatcaggctgggaaggaggcgagtccaccccgtgctggacaggctgtcgtgactaaacgaacatgaacatggccatctgcctggagagggcaatgttatcatcaccaggaaaacccaagtaagctggtgaggccacagcaaatgcagagaaaagcccacagccattcgccgggcatgaagctatggattcgatgctacgcctgtcaccagcagccgttcctcatcctgtcgtgggggtgctcgtttcagggtgggtttaatcctagcatctattttgctctcattgtccactgaaattattccagcccaaccagacttgtgataggaacgagagttttatcagattttttatttcacgtttaggtttttcttcaaatagtattttgatgggggaagcaacacagaattaaataacaggttttttaggtttatttattttgaaaaaacaaaaaaagtattttttcattatagaaagtgatctgcctgtgacttataattagagcgagaaacaaaacatgggaaagaaatgtatttttgacatatatatgtatttcattatcaatatatatgcatatatatcaatatatcatatacatagagatatacacatgtatgtttacatatatcaatatatgataaatatcaatatatgcatagtgtgttcacatatacaaaatatacctattttgatatatattatacaactttacaaacaaggttggttgtaccgaaaccaaagaaaggaaggctggccgggcatggtggctcatgcctgtaatcccagcactttggaaggctgaggtgggcggatcacttgaggccaggagtttgagaccagcctggccaacgtggagaaatgctgtttctacaaaaatacaaaaatttgtcggctgtggtggcaggtgcctttaatcccagctaatcgggaggctgaggcaggagaatcccttgaacccaggaggtgaaggttgcagtgaaccaagattgtaccactgcactccagccagggtgacagagtgagactctctctcagttggaaaaaaaaaaaaaaaggaaggaagatggaccacagtactccactgtcagcctggtaatcaccatggcaatggacctgggattcctcatgtctggatgctgcttcactgagcacaggtggcttctaccacactgctacattttaatcatcacccactggtgaggacactgaaggtcagtgcccttgtgacttacttgagattacctggctgggcttgaacccaggtctcctcactccaaatgtcacagtcttttcgttagctctgttgcctcccggtggcacacaattaccattttacaaacctcaaacttgtccccaagaggcaactgctttaactgtttgatgtcttttatcccccttgcaatggactctaatccacttttaaaagtgaatacctcaaatctgcagctttagggagatatattccaggtgctggctcggctgtctgctgattgataaatgccaagactgctcctgatttgaggcaagagatgggtgcagtcctgggaagaaaaagcatgcctggagagtcagctgactgcgagcgacagccacgctagtgtcgaatggggtcatgaaagccacctgagcactcagcatgtgcctgcagtcccacctactcaagaggctgtggcgggggatcgcttgagcccaggagtttgggactgtagcatgctaggactgcacctgtgaatggccactgcactccagcctgggcaacaaagcgaggccccatcattaaaaaaagaaaaaagttatccagggccacgagacccagccagtcatccctcatttttcagccctgactctgccatttagtgtaacccttgaaaagacatgctgggactatgacctgttcttataatattttcaaacctgtatgtggccccagatgtttcttggcccacacgatggacctgtcacacctcgtggaacctgaactactcctctgagcacagtgcactccagaaccagcagctgggaccatccagatcacagcagcctcaaatcatctggcctaaaaacccagaccggcactccttgaacagctcctccaatgccagtgaagtcttagaactcagattgctgcaaagtgggaaagcaatctcccttcccctggggccagcgaccagctgacctaactgtgaaggctgctagactgctcaatggctcagcagagcttatgtcttcgttcacaaggaacaagccttaaaatccagctgtgatattcactttgaggctttaacacgttgttagtgaaaaatctgtttggaaatacatttttttatttatgttttattttattttttttatatactttaagttatagggtacacgtgcacaacatgcaggcttgttacatatgtatacatgtgccatgttggtttgctgcacccattaactcgtcatttacattaggtatttctcctaatgctatccctcccccatccccccaccccacgacaggccccagtgtgtgatgttccccaccctgtagaaatacattttgagttaatcaaatgcaatcaagaaaatgagatgtcctccaaaaatttaatgtaacaaagatttttttacagtagtaattctcattgctggggatggtgtggtgcaataggctttctcatacactactggaagttccttccaggaaaaactatttgttgatgggtgtgtgtgtgtgtgtgtgtgtgtgtgtgtgtgtataagaagaaatgtgttaaaaacactcacctacttttatcagtaattccacttttggggatctggccgaagaaaataatcaggaaatgaaaactggttcatataaacaggcattaatcctggcattatttgactttttaaaaaattaaatgtccaacactaccaaagtgattaaataaattatggaatgtccttgtgatggaatatttatacagttattaaaactgatgtttgcatagttttaatgcaaacatactttcatgtatgcaaagtatttttttaataaaaaggaaatggcacgcttatgaccccacggtgagtgcaaatggcatacacatagcacagtgtcactcagcataggctataggaccatagacaaggacctggaccatagacaaggacctggaataaaatattttgagattaataatggttagaatatgtgaagcttctgttttctcctttatactttttttgttttcttccacaattttagaattatcttgatttcctttcactacaagaaaataaatacttaaatacattagtaaatattttggggtagagaagatttttaagacggtagttatgagtagttgtgtattcacaacagcaatattccccctggagagtgagctaataaacacatgctctggtataaatagctgtagggctttgacattgcctttacattcaaaatgagttcatgtcatgctgaaagaggagtcccgagggaagcaggacctcgctgcagagcttggcttaggagaagcagagagctgggtgcttccccacctgattcccagcttctgctctgtgagttccaagctgcaaaactctgggcaagtcacttatcagctgtgatccatctgtcgccgtcgatagagcagcatcagtgactcctggcttcctcacagggccaccaggagggccagcagatgacctcagtgggagacagcagggctgttgagacgaggactccccagctgttgcagggtccatacagcagtttgggggacaccagcctccaggtcaagttctggtctgctgtgacccgaggccccagagatccctgtggaaagactgaactactcacataatgctgaccactggagtttgcaaagcctgttgacatttgagagctcacctctaagccacctggctgttctgtgaggtggacaaggtggggaaatggtgcttctgcgacagacagtgaagctgatgctcagagattggatctcaggaacccaagtccccaacgtggcccagggggtcttgaagcctgacctgtggcccagcccccagactccaaggccagggctctttttactatcctctgtgagatggagatgggtttactatgtccattttacaaatagggaaactgagactcccagaaggccgggtgacgagcccaactcatatatgctcagatctgtgaggtgacatagggttcctaaaaatcacggtagcatgcagggcctgtggcaagaatggggttaggagcacaacactcaaaatattaccagtaacattgaaaacaaagacagaagctgaataaaatgatagcaccattttacacacgttaaatgcataggaaatgcataaacacgaaggtaaacatggcacttaccttgggaaagatccgaatttacctgtgcacctgggcccaagaagagttacagtttctaagtgattgtgcagtggaggaaggagggttacctgaaatggagcagatggttgtaacaccaggtgtggacaggtgtggctcctaacccacagctgaggtgacgttgaagggccacgtgtgtgtgcacatgcttgtgtgtgtgtgtgtgtgtcctgcagggcttgccaagcaggatgtagttttctgcattggcctagcatttcctgaggacaaaatcacatataggtaaaaaccaaattcgcatcacgctcaaattaccactaacatgtcaatcacactagaacaaatttgtattttcaagacaagcctcagagcagaactggctgtacctagtgcagggtgaggctgcaagtgaaacacgggcgcgcttctttttctgatcccaaagtgttctttacatagaatgtttctgcaggcattttcttctttctcttcctcttagcctggctccaggctggcagtagatagcatcagctacctgcaacagatggggttgatggggtggcgcgggcaatggcgcaggaaaaattctgagactacgcctgaaccagcagaaggaagccatgatgggtcatggtgtcttggagacacagatgagagagttttgtactctactccagatctgcaacttgccaactgcgtgggcttggacaggagactcagcttccttgaagcttggtttcctcgtctgtaaaatgggaataaatgtagtacaaccctcaccaggtgagtctaagggttaaatgagatcaggcatgtagtaagtgttcaacaaactctgatgaccttgctcctcctcctccccttcctctactccctcttccaaatctccttctactgcttcttcatagtcatctttgtcatcatcaccatcatcatcatcaccatcgtcatcctaccaccaaagaaaaaaagtcacaaccccccagttcctgagacatggacgatggagccaattttctaggagcatcaaaatcttaatgaatcctctgggtctgaggtacatcatttgtccttgcaccctagacttcacttactgcaggaagcaagctcttccttgagaaaagcagcaggagcaaagcgctccttggcttggtctccccaaatggcagttttcctattgggtcctgtgctgtgacttttcttccctggagctctgcatttgtgcgcattccttacgtgccctgaatgatctcagcaccaattgcccacacgtctgaaaccaggaggccagctccaggaaggcgggacatgtctgggaggtggtttcaggcattcaaagtgctgtccacagactacaagcatgggcatcgcctgggagcttgttaggaatgcaaaatctcaggcccggccaggaaccataacctgcattttaataggatgcccaggtgacccgatgcacattacagttcgagaagcactggtcttaagggacacaagagccacagcccactgggctctgggagaaatggctatcccttgatatattgaatgcctgtttcttttggtatgtcctggggattacgtgcacatgtctaaactcacatgggatggtgttagaatcctgactccagctgatattctgtgtggcttcaggcaattggcttcacctttctgagcctctgtttctttttctgtggtctgaaatcataataataatagttattaatgtttgacacaaaacattaatgcatccagcacagttcttagcatgcagtaaaactcacagaaaatgatatgaccaccattgttatttggggtgaacactgcaaggtcctccaccaatatccactttctttttcttcttcactaacagaatctcaattttattcaagcagtaaattgcgtttcacaataggcaccttagtagatgtgcctgttcaacaacgttcgccttcccagacctcctggaaaccagaaatgaccatgtgaccatggtcacaatcctttggcagctttctctcctcaatagaaaaaaaaaaaaaagattttagaatgtcctttctttcctttcctcccttctttcttcttggactctggatgtgatgtctggagacaaagcagccattttgttctggtggggatgaaaagcacagtggaaggatgggtaagaggagagaaagaaggtggctgggtttcagtagcactgtggagccactatttggattgcctgtgtctgggcttcatggtatgaagcaggtgggaggattaaagatcaatttctctgacatacagcccaacatagtcctaactagtaatgccgtcatcataacgctgtcatcattatgatagctgttgttcctgaccatctctggcacatactaaggactcatcctgggtccttggtaagcatttgctaatttccgttgaacagtttgaaggaaacttaacctgggaaacagaattgactatcaagctcctttaaaaaatgagaataaaaagaaaacataatccaactatccaccaataaaacctactaaatgcattttgacatgcagcttttcatgtttctttttacaaacacatttaaatatacacctacttgtaatgataacgtgcactgtgtatggttttataacctgttaattttcatgtatctgtatattaccatatttttcatgccattaaattttgcttctacaataaaaataacaaatcaggtaatgagatgagcctgatccttcacttgcttcagttttgccttccaagaactgtgtctttgcaacacttatttgagcagacatcacccccacaaatgcctgaatgaacatttcctgttgaaaaactgcatcgggaaagacgtcagagctgctggctcacgttttctggagagcttcttacaatgcccagaggaaacatgggatagtcactcctttaacggctactcattatgttcctccaaatactgctatgaaaaattcacacccattttcacaatgaatgcacatttttttacaatgatgaaaatgatgtaagactttaattctgaagttctactccaggacttcaaatgcttcttgtcctgctttggtccaaggtcctgcgtgtgtgggaagccctgtcttcggaaggcaagtgaatcagaaattacttctgaaactgactccaatactgataatgtgctgataacagaacgaatagcatccttagtatttctcacttaataaaataagacaagaaatgatttggaaaagcacctgcgccaagtcacaggggccaggctgcctgagggactcccaccccaccctacccccactgcacccaccagggcagcctgtccttgttccccagctaattgttcctatgtcagaaggtggattcagtgctgctggattttttaagagtgattagaaatatacatttttatttgaaatcttcccatttttaaaggtcagccacttcttaaaaccacaaaaccactattaagagccacaaaataaaaccagtccacaggcagaggcgggccagtgcttggagttagcatgccctccttgccagcctgtcttgttagggagaggacggagtttcagaagagacgttgccagagggccatcgcattatggtaatagcctttttgcttaacttcggtttgtccacacccagtgcttcaggcacaaatgagacaaattaaaggcattcagctgggagccagcacacatttttttagttaaggagctgagcgagtcattaaccgcctagggctggtggaaggcgggggaggccccagcaaacccaggaggtgcccaggacccatgacctcattctgtcccagcccaagtcttcactgcttcatgaggagttgtgacagcgtggccttctccagccccacatggcaacagcaaggccagggaggtggggagctcgctgtttctgttccccacaatccaagcctccagacccaggtctgggatgacagagaaaatcccaaagagtaggcttgccgcacttcactggcgtggagcactgtgactaatgcccacacttagcctggtgctcactaagccctggctgataccactgggcgctcacactgttgggtgccaaggccttcctgagtcatcttgccttccctctaattgaacagccttcaacctatataggatgatcagctcttctcggttcacaggggactttcctggttttggtactgaaaagtcccacatccccaggagcccttcattctgggcaaaccaggacacttggtcactctgagtctatgcaaagcccagggagttgattttgaatccaaaattgagaagtcccatccgactgcagaagggcataattttaaaaaatcagaacgtgggcattccagctaggtgggctggagtaaagaatactcgactggactttgcttccaagggtagaagggcagtactgaccacagcaggatagtcctagaagcagctggccaccctccacaaccttgctactcaaagtgtggtccccaggtcagcagtatcagcaccatctgtgaaccttttagaaatgcagactctcaggccccagcctggaccaactagatcagaatctgcattttgagaagatgcttgggtgccacatagcacacaggttggagaggtactgtctgtgggtgctgcgttcttacagcttaacttggtgaaaggagagaatggggctccagagaggtgtcgggaacctgagcaggtgcaagaagtctcatttcacctccctgggttcctggaggctaaagctgttcagctcccagaaaggcaaggaggtctgtctaccaggatagaaggacacaaatgagtgacaacagttccaggctacatgtcccctgactatagaccttagaggacaagggactttgtgcattttttttattaccccctctgcctagattttccaggaccttccagataaaatgtactaaattctgtattagattggaatgctttgggctgcaggtatcagaaacccaactaacagtggcttaaacaaatagaagtttattgttctcacacaacgagcagggaggggtgggtgctgtgtggctggggcatggcttggccatgccggcagggacagaggctctccctgccttcccctctagaattctaagcacttccactttctgtcctcaggttggtggccttatggcctcaggatgacctgctgcagcttgaagcatcatgttgatgctttcaagacaagaaaggaaaaggggaaagccaatgaacatgaccttctttttcaggagagcaaaatatttcttataaattgaccacctacttcagctcaagccttgtttgtggtgccgcaatgccatccggaccgaagagagtctgggaaataagtcactgacaagagggacaagcagctgtgaggagctcagatcaatcctgatccattgcctagagccaaagagagccaagagggagccagccacggcccggagacgcctcctgtaggtcttctggtctttgcataatggccctgatcatgttggctgttcatttacatttctgaccccttctaggtgatggaacacttaaaggcagtgaacatgtcttagttgtctcaatacgtccctggtgctaacataccaggcacagagtatgctcagtggatatttacagaatgaatgaatgaggatgccctcagtgcccattagccagagccactcatccccaaatgtctcgagatggtggcatcggctttatctcacaattggctttatctccataataacttatcttttcaaactggaaccaggcttcagataactggggcaaagtcatagagaatcatctagcttgagtctgaagtttcagttccatggagcctggcttaggagtgcgatcagaggtggtcagcagctgccagactcacccactcccatgaggccgactacataaaaagaaggaacaaaataaaagccagcctctggagtcaggtgaagccatttgttcttaaggggagtcacaggcaaggctgcactgtgtgccttagaatgtcgcagctaatcatggtccatgaaacatgatgggatggagcaagtcagacgattccgcctgatatgtgccatatgacagccgttaagtcgctcggtctactggaaataacatttcatggtgatccaggtaggggaatgcagccaagagcagagagactcctcccgtctcgctggagaacaggagggggttgttagggtgacgtctgtcattttatgagccaagtcaaggcatataaaagccagggagggcacagggtctccccaggaactaatttggatgggaaaaataaagattttatgtgctggctcaggcactggactgaaaatctcaagaatctaatcagcgccaggtggagggtgaagcagctcagtggctggcgaggaccctgcgtggggcaggcaggacgtgggggccacatgtctccgtgctggagatgcatcaggctgagtcataacaggcttgggcttcagcgacccacatctttgggcaagtcgcttcccctctcagctccctctgtttccacatgtgaaaaatgcttgtgaggatgaaaggcaagaaggtggaggccaagagctcagcacggtgcccggcacagagcggttgccaataaacaaatcataatcatagccattaatggggccaagtcccagctagggtgccctgaggcctccccctccctctgtggccaggtggtacggttgccagattgagcaaacaaaaatacaggacactcagttaaaatcgaatttcagatagacaatgaatcatctttttttagtatccatatgcccctaaatatttcatgggacatactgatactaaaaagttatttattttttatttgaaattcaaatttagccaggcatcctgtgttttttctggcaaccctacagggtgagcttaggtgcagccatagatgaaagaagggatttcaatgtcagtgatggctgagtcgagtggtcaaattaactaaaggaacctatgttctgtgcactcaaattaaaatttctgatctatgaactccaactctcaaagcttaaacgggggggaaaaaagcctcctttagtcgataagcaaactaatgaaatgacagaagactggacaagagtgtcccgttccccagcttcagcagcagtttcctgaaggcccccacgccctctcatcccattttgcaaaagaggagatcgaggctccagcaggtgaagagagttgctgggctagcatgtggctgcagtccaggtctgtctgacacatgagccaataaccgtcaccaggagaccccactgcctctcactgcttaaaaaggtcccccctggcaggccacagaccacccccaacttttgtggaggggagaaaatactactgaacatcaggtgagagcaagtttcccaacctctttgtgcctcaccttttccctctgcagaataggaataattattctaccatctcgatagcatttttggatgacttggtaatttaatgtacattaaggacccagatgctaattgtgagtagacaaatgccatttattagacttatcgtaatgaagacagtaaggtttcattgttaaaatatcagccgtgaaacacatcagaacgagttcagccctggattcacctctttaccaatcttgggatgtttctaaacctctctgagcctccatttgttcatccataaaatgggaacctcatggagcctccctctcgcaattgtccggcgtggaatggagtagcacaggtgagcactcaagtgcaggctatttgtatttcaacaggcagagaggattggggtgagagccagtggcctctctcggggcccctgaatcctggccacacagagtgggcctctcctccgcaacccccctccacccgaccaacaatggagctgtcacaagcccacatctgctgctgggtagagatttttctctcaggattcctggaggggcccttccaagggccacagcccttcttgtttatatgccgagaacaatgaagacctagaagccaagtttgcaactgggtctggaggaaaatggttgtctctccaataaatccacgtgcatcattgttaatgaccctggaccacacagcccacccacagggcctgcccattagaggtcagacaatggctaatgagattgccatccctgattaagccaggaggcaatgcttctttaattctacacacagccaggaggcagggcctcagcctctctcttactgggacttcccatttcctcttaccagttctgccatccatggctttctggattcaccaaaacttcaggttcctcaagggacacagatgtgtcaagtgcattttctggcttgagggactgtgtgtttcatagacatctttccagtttcatagccattttgcccaggagtgtcatcagctgagattcaagattcattgatgcttggctgagaaatccctgggagataagaaagtcaggttcacactggatgcatggaactggaagcacactgcagaggggaatgtgagtgctatttgcagtccctcttctgggccaaaatttggcttagggcttcccctaccctccctcggcctctatagcctgtgagatagatattagcacctccttttgccaaggaagaaatcatggctctgagaaatgacatggtgcacgcaaggtcacacagcaagcaagtggagtggagggcgtgagtccatctgtctatatgccaagcttgtgttttttcccactacacatgatttgttcacattcggctcataccagtgcttgaagcccactgcagaaccaagccccaggactcacatgtggcttccttaatgcccatgtggcagttccagtgccgtcaaatccctctaacccgaagcagttaaaactgatgatttaatgacccactggtacatccacttactaatctttgtgagcacaccaaggtgtttttatttctgctgtttggagttgcatagtaatcttttacataaaccacacccatttttacagtcaccagcatttatagtttccaatcctttaaagtgaagtaaaaattaaagggcacttacaaagatatctgaatgcagaatccttcattgtttgtgtattttttcatctttacagtagtttcttcctcactgcattgttcagcatattttttaggaactcatatttttcaagtcattccacagcatttgacttatttttcacagaagcaactattctcttgctttcacactcatagttttttagtttatatagtaagtaattcagttgaattttgaaattaaagttacaaatataactggcattagaaggcatgggaacaatccacagactcttgttaatcaaatgactcattgaatgaaggcagatgtgggagagctcactgaggtgtcactgaccagcctccaactttcagagcactgtgggcggccacagaatgtttacagtggcaggggagagcactggttagtggctcagtgatgtgaagacaggtgaagaaagcttctattctactatctcaatggtggtaacagtagcagtggtgactgcagtgatttctcagtatttagtgtgagtgccacgtattactatccatcctcactacaatgcctagaaattactgtatttgcagtctaaagattagctagtatataagtcactcaattttaccaggaagcttttctgaaagatattatctactaccccagactagccaagtcttcttggagaactgccaagtagccaggaagactggtttggagatgcctcttctttctgctgttcttgaagcttgcacagtttcttacccaaggggagcaggggaggaaagggacaagttgctgagagttattccatccattggtttatggtggacttgatggtgtcacacaaggaggcatctgagaaacagaaaatgaatcttctatactggcaaatacaagattttcccctctgttttaagatgaggaagcagactcagaagtgaagtgacttggccaaggtcacatagcctgtaactggaaaagctgagatttcaacttaggtctatttaactccaaatcccatgtgctttccattgaacaactgttgccattgagctgggttgggctgagttgagttagtttgagttgaggtgagttgggttgggctggctagaattgggttggcttgatttgggtgggttggttggagtgggttgggttgagctgaattgacttggtttaagttgaggtgagttgggttgggttggctagagttgagttggtttgagttgggtagggctgggttggattaggttgggttgggttaagttggtttgaggtggggagggttgggctgggtgggttaggttaggttgagtttgcatgggttgcattggtagcactgaatcacactaagccctttgctgtgtagtcttggtcccaaaacagagggcgaaaaaatgtctcttttatagtctttcagcaacctgagggcagaaagggggatcaatacaaaagaaacagacaggaatcatatatgattcattgttgaattctggtgggattgcccaagtaaatcatgccctgggcaaaccagcagagtaaaaggcaccttacagagctgtgtgtggggagggggcccttctgtcacattgcccagaagatatggatccaactatcctcatggtcagagatcacagaggccccagcccagttctaatcccttcatgtgaaaatcacgtgacacagccccaagcctagcagaggttcctggagaacagcgtctccttgagcaccggctgggtactccatgctgctcgcctcctctctctgtctctaaacccacgtcagctctcttcaggaggtatggtcaccatctttttacacacagagaagttgagataaaaataacttgctcaagtttacacagctaatcatggccggaagctgggtttagctctaggtttgtaggaccctgggaggttgggttctttccacttcttcacatggcctttcaacaggacagaaatcagcacaagcctgtcatcctggaggagctttaagcagaatgtgtgtcttccatgggggcagctggaagggcttccgggtagggctcaggaagaagtatcatagcctgggggagacctgtagagtaaggaaacttcctgccccacaacagtcagagacaagaagtgatgacaaccaggggctgttgatggtgttcccctaccctctacccatctgacttctaagcctcagtttttccaacacattctgtaaaagggggtttttaactcagttcattcaacaggcatttgtggagtgactacagtgtgccaggcatcagactaggtggagagaagttggaggcttggtcctggtggtgtggcacgtggctgggactgggggtctacgccctcctcctgccacttccaagccagggggccccggaaatgtccatttacctcattgaggttcaatttctgcccatggaatatggggagaataataataatacctggggctcaggtcagctgtaaggactgaacacggtgtgtggggagcacttagcgcagccaccagggcgtggaccacctcgggcaggattgtgctggcttttatgcaaaggcagaaagtgccgctgagcctggaagaaaatgaaaagaacagtggctcacatttcttggcccactccttctcaaataccacattctgcataaaaatatccttcaaaagtcacggccaaacccccacggcggtgggaatgccctccctgtggagggaaagccacctccgacagcgagtgtcgtttcagatgcagctggcacagagaacaggcggatggaggagtgacaacgtgcacagccgactgtcagggcggcctcggcagggagtgtctgggtgctcgccgattccttcaatgcttctgtatttttgaaaattttcataataaaacgctaggggaagtggaaatgcagccagtcccaaccctgcaggagagggtggttccaagcaccatttcctcatttctttgagtctctt
